United States Patent Application Publication US 2008/0168583 A1 - sequence listing, part 8

SEQ ID NO: 47953 - DNA, 57 bp, Gossypium hirsutum
  Clone ID: LIB3196-045-P1-M1-B11
aaaaaaaaaagaaaaaaaaaaaaaaaaaaaaaaaaaaaaaaaaaaaaaaaaaaaaaa

SEQ ID NO: 47954 - DNA, 363 bp, Gossypium hirsutum
  Clone ID: LIB3196-045-P1-M1-B12
gattccttaaacaaagcctaccaagaattcgttgcagcagcagctaatgtcctcgaaactaagggatcttcggctgcccaaaagacggaatccaccgatacggcattggaaagctttaaacaaaaatgggaaacattcggactggcttgcgatcaagctgaggagtttgttgagtcaatcaaacaaaggataggatccgagtgcttggtcgatgaagccaccgggaattcgtcggagcggttgactggcctgccccccatcagtgccgtccgtttggagcagatgagtaaagctgttagatggcttgtgattgagttgcagaacggttcgggaactgccgccgcccacccatcgacacctttc

SEQ ID NO: 47955 - DNA, 127 bp, Gossypium hirsutum
  Clone ID: LIB3196-045-P1-M1-B2
gataaatgtataatgagcaagacgttgaggactccatagctgacagctttattgaaccatctgttcaacacgaggagatagatgctggccgctctgtttttaatgcaataaacgtactttgtcatgg

SEQ ID NO: 47956 - DNA, 296 bp, Gossypium hirsutum
  Clone ID: LIB3196-045-P1-M1-B3
atactgcctctcaaatctgccaccacttatcagcagatggcctttgcccctgaagatgtttcagactggctctaagatgggggatcttgtacaagaagagaatggtgctgacactgaactccgagttagcagacctggattttatgcacagtgctattgttagctatataaccttgggccctctccaccacggggattcattttatgatggacaacttgagaaaatgcagttaaatcacttgcagtggtgggtctcaccctaagagtctcatgttgcataaagtatcagccttaaa

SEQ ID NO: 47957 - DNA, 366 bp, Gossypium hirsutum
  Clone ID: LIB3196-045-P1-M1-B4
atggtgccactgccggcaggagcccgaggagagcctgggccgcttcctggagggcctgggtgccgtcttcccccatgagccctggctgcagctgtgccgggagagaggcggcacgttctggagctgcgaggtcacccaccggcaagcgcccgctgcccccagtgcccctggtgaggaccaggtcatgctcatcttctatgaccagcgccaggtgctgctgtcacagctacacccgcccaccgtcctgcccgaccgccaggctggagccacccctgccagcacggggggcctggctgtggtctttgacacagtggcacgcagtgaggtcctcttccgcagcgaccgctttgatgagggccccgtgcg

SEQ ID NO: 47958 - DNA, 355 bp, Gossypium hirsutum
  Clone ID: LIB3196-045-P1-M1-B5
agacaacagggaaaagctaaccatagcagtgctccaccgacctgtcaataaccctggacaattccagaaattcttccctgctggacaggaaaatcctcagtcatacttacgaatcttcagccgtgaaattcttgaggctgtcttcaatacacgaagtgagcagctagacgagctgtttggtgggaggcaaagccatcgaaggcagcagggacagggaatgttccgtaaagccagccaagaacaaataagggcattgagccaaggagctacttcaccaaaggggaaaggtagcgagggatacaccctcaacttattgagcgaaacacctcgctacttcaaccaaaacaagacgttt

SEQ ID NO: 47959 - DNA, 378 bp, Gossypium hirsutum
  Clone ID: LIB3196-045-P1-M1-B6
ctagagggaacgctggagcgcgcgcaggccccgccccggtatccccggtgcggcccaatcgtccgtacactcgttcgcttcatccagcgatgtaaaattctcatcctaagctgtggaaagggagaaaagaaagatgggctttatttttcatctgcttactgagtaatcctaacaagggggggagcagcccccatgagcatgggtgtgacatgacaaagacatattgtcactgtgcatgagtgactaatcacaactgtgcagatggaagaggagaactaagggtgcctattctaaagacatgagcgatttcaaaaacaatgctttctctctataataggataactgaaggtcgcacttagctgatagatgaaggagact

SEQ ID NO: 47960 - DNA, 293 bp, Gossypium hirsutum
  Clone ID: LIB3196-045-P1-M1-B7
atgggatcaccccaccctggcccacaagatatggcacattagctgtgggtgcggcgttcactcccgcgttcggatccttttgtacaactatgtaaacccggttggtgaaaaaaggcggatgggcctgttcaatgcccgattagtggccggcgaagactcccgggacccccttcccttagatcccggaccccttgaggttcttcgtagatacggggggccaaccaccaaacccttacaaaccgggtctggggggccagaacccgccccgcaatgggtaccaggggcagatcctt

SEQ ID NO: 47961 - DNA, 288 bp, Gossypium hirsutum
  Clone ID: LIB3196-045-P1-M1-B8
cggacgcgtgggaaatcagtatccatagtaggatacgcgatgcacaatggtggttggtctaccgtagcttcggccagttgcttaatcggttgggccattgggtgatttgctaaattcgagtttttggtaaccttagcggtaagcacttcttttggtgaatcgacttttactttttcactttcaaggggttgagtaggggtttcggttacccttagactcaactgtggggtcaacttcgatttttgggggggggttactctgagtcccaagcactttggatggcttttt

SEQ ID NO: 47962 - DNA, 360 bp, Gossypium hirsutum
  Clone ID: LIB3196-045-P1-M1-B9
gcagtggcttgacgttcccctttgctcccttcttccagaagccaaaagtttgagttaagaacaatggcttatgctacaatgaagccgaccaaacctggtttggaggagtcccaggagcagattcacaagatcaggatcactctctcctccaagaatgtgaaaaaccttgagaaagtttgtgctgatttggttcgtggtgccaaggataagagactgagggttaaggggccagtgagaatgcccaccaaggttcttcacatcacaacgaggaagtctccctgtggtgaaggaacaaacacatgggatagatttgagctccgtgttcacaagcgagttattgatcttttcagctcccctgat

SEQ ID NO: 47963 - DNA, 370 bp, Gossypium hirsutum
  Clone ID: LIB3196-045-P1-M1-C1
atcgcggggcgcaccgcgcggagccggccggagcgcgaggccggcagcggcgggagagcggcccgggtggcctcgtagcggagccccgcatcgccgagtggcggccggagccgcggaaaagattctcagtgctgattttgagatgatgggcttgggaaacgggcgtcgcagcatgaagtcgccgccgctcgtgctggccgccctggtggcctgcatcatcgtcttgggcttcaattactggattgcgagctcccggagcgtggatctccaggtgttttgttttgtttattatgtttattttatgtttatgttttggttattttgttatggggtcccgggcgtttgttgttcattgccagccagggcattt

SEQ ID NO: 47964 - DNA, 382 bp, Gossypium hirsutum
  Clone ID: LIB3196-045-P1-M1-C10
atgccggatcgccttcgccgccgcccgcctcctcgctttagctcccggcccgtcctcgcccccgccttcgccaccgcctcggcccgcagagctcgccctctccccacctgcagatatgtccgagtccaagagcggccctgagtatgcttcgtttttcgccgtcatgggcgcctcggccgccatggtcttcagcgccctgggcgctgcctatggcacagccaagagcggcaccggcattgcggccatgtctgtcatgcggccagagctgatcatgaagtccatcatcccagtggtcatggctggcatcatcgccatctacggcctggtggtggcagtcctcatcgccaactccctgaatgacgacatcagcctctacaggagc

SEQ ID NO: 47965 - DNA, 314 bp, Gossypium hirsutum
  Clone ID: LIB3196-045-P1-M1-C11
atcttcggagaaaggtctgttcagatcctttgcccgttttttaattgggttgatttttttttttttattgttgagttattggagttctttttatattctggatattaaccctttatcagatacattatttgcaaatgttttctctcattctgtaagttaacttttctctctgttgattgtgtctttggatgcacaaaagttcttaagtttgatatagtcccatttatcttattttgcttttgtttcctttccttttggtgtcatatccaagaaatacttgccaaatccagtatttattaagcttttcctccatg

SEQ ID NO: 47966 - DNA, 383 bp, Gossypium hirsutum
  Clone ID: LIB3196-045-P1-M1-C2
atccgagaatgagtttgtgatgctgaagaaggatgtagatgctgcctacatgaacaaggtggagctagaggccagggtcgatgcgctgatggatgagattaacttcatgaagatgttctttgatgcggagctgtcccagatgcagacgcacgtctctgacacctccgtggtcctctccatggacaacaaccgcaacctggacctggacagcatcatcgccgaggtcaaggcccagtatgaggagatcgccaaccgcagccggaccgaagctgagtcttggtaccagaccaagtatgaggagctgcagcagacagctggccggcatggcgatgacctccgcaacaccaagcatgagatctctgagatgaaccggatgatccaga

SEQ ID NO: 47967 - DNA, 358 bp, Gossypium hirsutum
  Clone ID: LIB3196-045-P1-M1-C3
gatctgaaaaatcggcatctctttaggggaaaaaaggggaagaaatggcaagagcaggagggataacgaacgccgttaacgtagggatagcagtccaagccgattgggagaatcgcgaattcatctctcacatttccctcaatgttcgtcgcctctttgaatttctcctccaattcgaggctacaacgaagagcaaattagcatccttgaacgagaaactggacaccctggaacgtcgtttggagcttcttgaagttcaagttggaactgcgtccgctaacccttctcttttcagtacgtgattcatatttaaaagttgtatttgtttccatatctttgtcgggattttgttcctctc

SEQ ID NO: 47968 - DNA, 364 bp, Gossypium hirsutum
  Clone ID: LIB3196-045-P1-M1-C4
cccacgcgtccgatggcttacacttctttgctttcttttagcgtttgcttgcttgttctcttccatggctgctgtgctcagatagatctcgtcactaaccatcaccaggatccaccttgggggcagcctcagcaacctcagccacgtcaccaatcccaatgccaactccagaacttgaatgctcttcagcctaagcaccggtttaggtcagaggctggtgaaactgagttctgggaccaaaatgaggatcaattccagtgtgctggtgttgctttcctacgtcataagatccagcgcaaaggacttttattgccttcatttaccagggctcctatgcttttctattgtgaacaaggggagggta

SEQ ID NO: 47969 - DNA, 367 bp, Gossypium hirsutum
  Clone ID: LIB3196-045-P1-M1-C5
caagaagctacttcaccaaggggaaaaggtagcgagggatacgccttcaacttattgagccaaacccctcgctactccaaccaaaacggccgcttctatgaggcttgccctcgtaatttccagcagcaactccaagaagtggattcctccgttgttgccttcgaaataaacaaagctacattcgtggtcctcgtcaccgacggaaacggccacgtcgaaatggtctgccctcacctttctaggcagagctcacactggtcctcccgagaacaagaagaacaagaagaacaagaagaacaagaagatgaaaggagaagtggacaatacaagagagtgagagcccagttatcaaccggtgacatatttg

SEQ ID NO: 47970 - DNA, 334 bp, Gossypium hirsutum
  Clone ID: LIB3196-045-P1-M1-C6
attgcaggccgaggccgacagcacaagcgaggggctggaggacgcagtccacagccgtggtgccagaccccctgcggcaggcccgggtgaggatggggacgaggacgaggaggatacagccccagagtccgcgctggacacatccctggacaagtccttctccgaggatgcagtgaccgactcctcggggtcgggcacactccccagggcccggggccgggcctcaaaggggactggcaagcgacggaagaagcgtccctccaggagccaggaagaggttccccctgattctgatgataataaaacaaagaaactgtgtgtgatccagtaaggc

SEQ ID NO: 47971 - DNA, 363 bp, Gossypium hirsutum
  Clone ID: LIB3196-045-P1-M1-C7
cccacgcgtccggaagagagtaaggaccgtagaggaggataaatcaaatatcagtaatctagtcaaggaagtaaaagaaaggatttgtaggtttgaaaaaaatagaatttcgaaacgtaccttagaaagctaatgaagtttggcagaggaaggtaggcgttatgaaaaccccaaatattggatagaagacgctctgaagagagtgaaagaactattaaatcaagattgacatggactacaatgagagggatgaagaatgaggttactgagaccgaaagaactatgactatttggacttcgatgaactcagattgtcatagagggatcgagccgtaaacggaagcatacccaagatcaacagga

SEQ ID NO: 47972 - DNA, 360 bp, Gossypium hirsutum
  Clone ID: LIB3196-045-P1-M1-C8
cggacgcgtgggctagccatggttgcctctcgatcctcctcgatatcagctcgaatcatcgctatctccatctccttataataatcttcaacacttctatttccttgagtaaggttttgaagtcgttgataaagatctcgatggtaggatgatggaataaatcttttccgcatgactggtttcatttctccccaaggagagatgggtctttcacaatttcatcgtcgacttgttacaagctggtcccactacactatggcatatagtcagaaaactcaattgccgcgagtttcacctttttactctccgaatagttgtggcaatcaaaaacaagctcaatcttcttttcccactccaaat

SEQ ID NO: 47973 - DNA, 366 bp, Gossypium hirsutum
  Clone ID: LIB3196-045-P1-M1-C9
gcacaatcaaaggaaacggaaaaggatggaatccaaccgagaatcagcgaggcggtctaggatgaggaaacaaaagcacttggacgagttaatggcacaagtgactcagttggttaaagataataatcaaatcttaaccaccatcaacttcaccactcaacactacatcaacatggaagctgagaactcggttttgagagctcagatgatggaactgagtcaaagactggagtcactcaatgaaatcctcaattatcttaatagtggtaccaatagcaacaacagcaacgatgggtttgaaacgagtgagggatttgaaacaacaagtgatgaaagcttcaccaccattatcagcaaccacaacaa

SEQ ID NO: 47974 - DNA, 366 bp, Gossypium hirsutum
  Clone ID: LIB3196-045-P1-M1-D1
cctagatcgtctccaagagagagatctccttacagctaccgtacacattcacacacacattcactgaatgggtcgagtcatccgagctcaacgtaagggtgctggttccgtcttcaaggcccacacccaccaccgcaagggtcctgctcgtttccgcagcctcgacttcggtgaacgaaatggctacctcaagggtgttgtcaccgatgtcatccacgaccctggccgtggcgctcctttggcccgtgtcgtcttccgtcaccctttccgttacaagaagcagaaggagcttttcgttgccgccgagggtatgtacactggacagttcgtctattgtggtaagaaggctactcttgtggtcggaaa

SEQ ID NO: 47975 - DNA, 378 bp, Gossypium hirsutum
  Clone ID: LIB3196-045-P1-M1-D12
atggccaagcaagcttctgtctgcacctgctctcaatcctgctctcactatgagcctccgcctgcagagctcctccgccagctatggaggtggttttgggggtggctcttgccagctgggaggaggccgcggtgtctctagctgttcaactcggtttgtctctgggggatcagctggaggctacggaggcggcgtgacctgtggctttggtggaggggctggtagtggctttggaggtggctacggaggtggccttggaggtggctttggtgggggttatgctggtggctttgttgattttggtgcttgtgatggtggcctcctaactggcaatgagaagatcaccatgcagaaccttaactaccgcctggctttcta

SEQ ID NO: 47976 - DNA, 352 bp, Gossypium hirsutum
  Clone ID: LIB3196-045-P1-M1-D2
aatgaccacatttctgtttttttttttccattgaacaaagcttgaaatcttaaaaccttcccaaatccccaattccatgtcaagtaaaatcatcaaaacatagaaaactagaagaatcagagaaaaccaatgacggtagcggctgggatcgggtacgctttggtagcgttaggaccgtctctctcccttttcatcgcttttatctccaaaaagcccttcttgatcctcactctcctctccagtacattggtttggcttataagtttgataatattatctggaatttggagagctttccttcctttgaattcaacaacatggtggccttttgcaatacttatattctcatcaa

SEQ ID NO: 47977 - DNA, 375 bp, Gossypium hirsutum
  Clone ID: LIB3196-045-P1-M1-D3
atggaagagaagaaatttgatgaagccctgaagttgagaggccggagcttcatgaacaactgggaggtatacaagcttctagctcatgtcagacccccggtatctaagagtggttcgcacacagtggctgtgatgaatgtgggggctccggctgcaggcatgaatgctgctgttcgctccactgtgaggattggacttatccagggcaaccgagtgctcgttgtccatgatggtttcgagggcctggccaaggggcagatagaggaagctggctggagctatgttgggggctggactggccaaggtggctctaaacttgggactaaaaggactctacccaagaagagctttgaacagatcagtgccaatataact

SEQ ID NO: 47978 - DNA, 378 bp, Gossypium hirsutum
  Clone ID: LIB3196-045-P1-M1-D4
atagaatatatcctggaagaagacaatagttacccgtttcctaaaactggttccagaccttttggccattgtgcagcgtaagaaaaaggaaggggaagaagaacaagcaatcaacagacagacagcattgtataccttaaagcttttatgcaagaattttggtgcagaaaatccagatccttttgtcccagtgctgagcactgctgtgaaactgattgctccagagagaaaggaggagaagaatgtcttgggaagcgcgctgctgtgtgtagcagaggtgacctccaccctgcaggcgctggccgtcccccagcttcccagcctgatgccatcgttgctgacaacaatgaagaacaccagcgagctggtctccagcga

SEQ ID NO: 47979 - DNA, 283 bp, Gossypium hirsutum
  Clone ID: LIB3196-045-P1-M1-D5
atcccagtacgaggagattgcccagaggagcaaggctgaggccgaggccctgtaccagaccaaggtccagcagctccagatctcagttgaccaacatggtgacaacctgaagaacaccaagagtgaaatcgcagagctcaacaggatgatccagaggctgcgggcagagatcgagaacatcaagaagcagtgccagactcttcaggcattcgtggctgatgcagagcaccgtggtgagaatgcccttaaagatgctcacagcaagcgcatagagctggagact

SEQ ID NO: 47980 - DNA, 370 bp, Gossypium hirsutum
  Clone ID: LIB3196-045-P1-M1-D6
atcgcaccttcagcagccgcctgatcctggagaaacatgtccaggtccggcatggcttgcagcttggggcccagtcccctggccgggggaccactttggctcggggttccagtgccagagcccaggggccaggtcggaaacgccgccagtcttctgactcttgcagtgaggagcctgacagcacgacaccgccagccaagtcccccaggggcggacctggatctggaggccatggccccctgcgctaccggagcagcggctccacagaacagagcctcatggtggggttgagggtggaggatggtgcccagcagtgcctcgactgtggcttgtgctttgcctcccctggctccctgagccggcaccgttt

SEQ ID NO: 47981 - DNA, 362 bp, Gossypium hirsutum
  Clone ID: LIB3196-045-P1-M1-D7
cccacgcgtccgctgaatcttatgtccaaaggggagatcaagcttcaattataggaggagctatcaatttcgtgaaggagcttgagcactgtgttcaattgttaagtgctaagaaagaaacgaaggaaagaccaaatgggagtagtagtggctgttcatcgccttttggtgagttcttcacattcccacagtactcaacgagctcgactcggggtgataacaattccatccccatgaatgagtcaatggttgggacccgatctgccatagctgacatagaagttaccatggtggagagccatgcaaacctcaaaataaggtcgaaaaagggaccagcacagctcttgaaactggtttcaggg

SEQ ID NO: 47982 - DNA, 363 bp, Gossypium hirsutum
  Clone ID: LIB3196-045-P1-M1-D9
gtttccccttcggatttccaggttttgctttctcttcaaggtcaatattccccttccgatgctcctgctgccgaattcctacattccctcattttgtcggtctgtcctccgccttcgttaccgatttctatcgaactcacagctgctttattggcaaaagataagctcaatgcttttggcttgatggaacctttctctctacaacaagacggagagaggtccgtccgtgcttaccggatctatcccaaagcatctttcttcaaccatgattggcttccaaatgcttgcagattcgattacctcgactcagcttcgggccagaacaccgacatgattgttaggatgattcatgatgtccctgta

SEQ ID NO: 47983 - DNA, 384 bp, Gossypium hirsutum
  Clone ID: LIB3196-045-P1-M1-E1
atggggacgctctcagctctcggcgcacggcccagcttccttcaaaatgtctactgttcatgaaatcctgtgcaagctcagcttggagggtgatcactctacacccccaagtgcatatgggtcagtcaaagcctacaccaactttgatgctgagcgcgatgctttgaacattgaaacagccatcaagaccaaaggtgtggatgaggtcaccattgtcaacattttgaccaaccgcagcaatgcacagagacaggatattgccttcgcctaccagagaaggaccaaaaaggaacttgcatcagcactgaagtcagccttatctggccacctggagacggtgattttgggcctattgaagacacctgctcagtatgacgcttctga

SEQ ID NO: 47984 - DNA, 321 bp, Gossypium hirsutum
  Clone ID: LIB3196-045-P1-M1-E10
attaaatcggatcagatgggataccaattcaaagaaaaggattgaattagttgactcaagaccaagtaaaaagttggttgaattatatttttaatatatatattttattttttatgattttttattaattatttaatctcaccaatcagattcgttggactggcgaactgacaacctaactagaggtgatcatgggccgggccgggtcaggttcgggccgggcccatataaatttttaggcccatctactaggctcgggcccggcccggccagaaatataggcctaaaattttgtccaagccctgcccgtaatatatattc

SEQ ID NO: 47985 - DNA, 382 bp, Gossypium hirsutum
  Clone ID: LIB3196-045-P1-M1-E11
atggcaatgtgaatccacttatgttgtcaaccatctcgggagcacctgcccaaagccttctggggcaaggatggtggatggttgggagaaatccagacattggcagctggcagcaatgagtcagacattgcccataaaggtgttttgtttgatttgcttaagctttatacaattattttttaagttgcagccaacacataaaattagaaaattccacaaaacattccagatttctggttgttctttaaaaatggaaggatcaggccacactgtcttcatagtcccactgggccacagtggcccggagccaacagctgctttctttgtagacctggcacagatgctctggtccctgcagtttctgccatccactgttattccc

SEQ ID NO: 47986 - DNA, 363 bp, Gossypium hirsutum
  Clone ID: LIB3196-045-P1-M1-E2
gaatgtcattgctatcaaagccagtgttcatctcccttttgatcaccgtatgcttgttcaaaatcttacagcagtggctttcaacaatgcaactgtacccccttcagttcaagctactttcccttacgtatttgctgttagcaagtacttacagcctggaacttttgatcttgtgggttcgattatctatgatattgatcagcaaccataccaaagtacattctataatggtaccattgaagttgttgaggctggtggtttcctcagtgttgagtccgttttccttgttacccttgggattgcacttcttgttctccttggtttgtggcttcacggtcaatttcagcgtatcaccaagaaaac

SEQ ID NO: 47987 - DNA, 386 bp, Gossypium hirsutum
  Clone ID: LIB3196-045-P1-M1-E4
atatttctttctcatgcctcagtggcatcagttagaataaggaatagagaatttcatttttgagaaataattttacagtatgttactgttcagggatatggcagacctgggatagagaactgaacccttgtgggaagggatgagcagcatatagtataaggttagttcattcttggggaggcaggtcctgatgacagagaggggagggtacctgatgaaaacttcgctcaattaaaaattgtgtctgtggtttatctttggatctagaagaggaagagaagttattttttcttttattttatgctcaattacagaacttacaagactcagcactcagtgtgtgtggtgaatactgtggccttaacatttgggttaaggggacatta

SEQ ID NO: 47988 - DNA, 385 bp, Gossypium hirsutum
  Clone ID: LIB3196-045-P1-M1-E5
attcagtgaggactagctagggttctccaaggtgcaatgccgatgcagggccctcatgtacccctacccctgcctgtgatggggtgttctgaggagctttggcatttgctggaagcacagcgagttccaaatgagaggaagcttgtgtggcttgagagcctttggggccttggctgccagagcacgaggcaggccaggacatggagagcccaggccctgtctccagggggccagatggggccttgcctgaaaggctgatccccttgattgctggaggtgtgtgggtggcaaccagggctgggcagggcttaaggtgtgtggaccaaacccctctagggttggcaaagctgcctgtcaagcctccaggtgggggcccttggacgca

SEQ ID NO: 47989 - DNA, 363 bp, Gossypium hirsutum
  Clone ID: LIB3196-045-P1-M1-E7
gctagggctaagaaagaggcagaacacaaggcaaatgctgagaaatcaactggagcagagtcttctgctgctgctaatactggaaaagggaaatcatctactgagaaggatggagaagccatgcaggttgatagccctccagagaagaaatccgagcctgagccatcatttgagattttgaccaacccagcacgagcggttcctgctcaggagaaggtcatcaagtttttagaagacagtcgatatgtgcctgtgaagatggcaccatccggattcgttcttctcagagacctgtgccctaatgaaccggaggtgctctctctaacagatgcacccacattcacggcatccccggcaggtgga

SEQ ID NO: 47990 - DNA, 373 bp, Gossypium hirsutum
  Clone ID: LIB3196-045-P1-M1-E8
atggccaagcaagcttctgtctgcacctgctctcaatcctgctctcaccatgagcctccgcctgcagagctcctccgccagctatggaggtggttttgggggtggctcttgccagctgggaggaggccgcggtgtctctagctgttcaactcggtttgtctctgggggatcagctggaggctacggaggcggcgtgacctgtggctttggtggaggggctggtagtggctttggaggtggctacggaggtggccttggaggtggctttggtgggggttatgctggtggctttgttgattatggtgcttgagatggtggcctcctcactggcaatgagaagatcaccatgcagaaccttaacggccgcctggct

SEQ ID NO: 47991 - DNA, 281 bp, Gossypium hirsutum
  Clone ID: LIB3196-045-P1-M1-E9
ccagatttgtgagcacttccacatctcatcgccacccccacctcgtgaaccatctaggatgaagatgtttaaaaaattttatttatctattttatgtttttacttttcttttattttaagactactttttatttttctttcaccttatttttattaagttttataattgttattttacaatttttaattccgactaattcattatgagtacttaatcttccttatatatatttcttaaaagagttcctgattctatcatagttataaagagctctaaagct

SEQ ID NO: 47992 - DNA, 363 bp, Gossypium hirsutum
  Clone ID: LIB3196-045-P1-M1-F1
aacaaagagtcctacaatatagtaccgggagttgtagtcaaagtcccagcaggaagcactgtgtacttggctaaccaagacaacaaggaaaagctaatcatagcagtgcttcaccgccctgttaataaccctggacaattcgaggaattcttcccagctggaagccaacgccctcagtcatatctccgagcctttagtcgtgaaattcttgagcctgccttcaatacacgaagtgagcagctagacgagctgtttggtgggaggcaaagccgtcgaaggcagcacggacagggaatgttccgtaaagccagccaggaacaaataacggcattgagccaagaagctactctaccaagggagaaa

SEQ ID NO: 47993 - DNA, 388 bp, Gossypium hirsutum
  Clone ID: LIB3196-045-P1-M1-F10
atgagaaacgaaagaatcccataggaaggataaatctggctaattgtaccagtcatcagatagaaccagccaacagagaattttgtgcaagacgcaacacttttgaattaattactgtccgaccacaaagagaagatgaccgagagactcttgtcagccaatgcagggatacactctgtgtcaccaagaactggctgtctgcagatactaaagaagagcgggatctctggatgcaaaaactcaatcaagttcttgttgatattcgcctctggcagcctgatgcttgctacaaacctattggaaagccttaaactgggaaatttccatgctatctagaggttttttgatgtcatcttaagaaacacacttaagagcatcagatttactg

SEQ ID NO: 47994 - DNA, 352 bp, Gossypium hirsutum
  Clone ID: LIB3196-045-P1-M1-F11
cccacgcgtccgacaaagagcagatggaagtgcacacttaaggatggcatcatgcatataaacaataaagacattctctttaataaggcaacaggcgaatttgatttctgattttgttagataaaactgtagtcgccatcgtattgcagcagttgccctaaaagagcaagtcaaggggtgttattctgtgtttcgtaatttgtcttttaattattattagagtgaaaggttgattgaggggcatgggatatgctttattttaatgtcttccttaagacttgggttcgatggttgtcgtattgtacataaaggaagagagccatttcggccttagaatggatgactacttgag

SEQ ID NO: 47995 - DNA, 271 bp, Gossypium hirsutum
  Clone ID: LIB3196-045-P1-M1-F3
acaaacccaaaaaacaaagcagtgtttcaagaacagaatatcggcaaaaatgttcattgagagctttaaggttgagagtccaaatgtcaagtacacagacaatgcaatccagtcggtgtacaactatgagactactgagcttgttcatgagaacagggatggaacctatcaatgggttgtcaagcccaagactgttaaatatgaattcagaactgatatccatgtccctaaactgggggtaatgcttgttggatggggaggaaacaatggc

SEQ ID NO: 47996 - DNA, 390 bp, Gossypium hirsutum
  Clone ID: LIB3196-045-P1-M1-F4
atcgccgacgccgtccccattcagcacgtgagcccgcccgcgcccaccatggccacagttcaacagctggaaggaagatggcgcctggtggatagcaaaggctttgatgaatacatgaaggagctaggagtgggaatagctttgcgaaaaatgggcgcaatggccaagccagactgtatcatcacttgtgatggcaaaaacctcaccataaaaactgagagcactttgaaaacaacacagttttcttgtaccctgtgagagaaatttgaagaaaccacagctgatggcagaaaaactcagactgtctgcagctttacagatggtgcattggttcagcatcatgagtgggatgggaaggaaagcacaataacatgaaaattgaaagatggg

SEQ ID NO: 47997 - DNA, 367 bp, Gossypium hirsutum
  Clone ID: LIB3196-045-P1-M1-F5
aaagaactagatcaaagcaattcttcaattcctggtacttcatggtgagtgtttctaatttttatcctattcctattctgccccacctccccttttttttaccgcctgttgcttcttttttgatggattttcatgcaagaaactttaggagagatggaaccaaggatgatattggaaccttgagtagttctcagcaacatttggtggaacttgcagcacttgtattgtatcgggtattctgttctcatgcctaatatctaatagctattttttttactagaactgatgctgtgctacactcttaaaagtatctatgttttgatataataatttcaatttgctgcatatcttgtgttgaattgtgcat

SEQ ID NO: 47998 - DNA, 358 bp, Gossypium hirsutum
  Clone ID: LIB3196-045-P1-M1-F6
ctcaattctcaaattgtagcgcccttttatatcaagcaatggctctggtcttgcatgctggaaaaacaaacaaaaatgcctttaaggcactcattgctgcagaatatagtggtgtgcaggtcaaaatggttgagaattttgagatgggtgtgtcaaataagactcctgagttcatcaagatgaaccctttggggaaggttcctgtgttggaaacacctgagggtcctgtatttgagagcaatgccattgctcattatgttgctcgctcaaaggttaacaaccctatatgtgggtctacattgattgattatggtcatatcgagcaatggattgatttcgcagccatggaaattgatgc

SEQ ID NO: 47999 - DNA, 382 bp, Gossypium hirsutum
  Clone ID: LIB3196-045-P1-M1-F9
atgccttgccagcctccaccccaggaaccatgcatccccaaaaccaaggagccctgcctccccaaggtgcctgagccctgccaccccaaagtgcctgaaccctgccagcccaaggttccagagccctgccaccccaaggtgcctgagccctgcccttcaacggtcactccagcaccagcccagcagaagaccaagcagaagtaatgtggtccacagccatgcccttgaggagccagccagcagatgctgaatcccctatctcattctgcgtatgagtcccatttgccttgcaattagcattctgcctccaccaaaaaagaatgtgctatgaagctttatttcctatacactctgagtctctgaatgaagctgaaggtcttag

SEQ ID NO: 48000 - DNA, 386 bp, Gossypium hirsutum
  Clone ID: LIB3196-045-P1-M1-G1
atggagattgctgagatcaatcgcatgatccagaggctgagatccgagatcgaccacgtcaagaagcagtgtgccaacctgcaggctgccattgctgatgctgagcagcgtggggagatggcactcaaggatgccaagaacaagctggaagggctggaggatgccctgcagaaggccaagcaggacctggcccgactgctgaaagagtaccaggagctgatgaatgtcaagctggccttggacgtggagatcgccacctatcgcaagctgctggagggcgaggagtgcaggctgaatggcgaaggcgttggacaagtcaacatctctgtggtacaatccactgtctccagtggctatggcggtgccagcggtgtcggcagtggctt

SEQ ID NO: 48001 - DNA, 216 bp, Gossypium hirsutum
  Clone ID: LIB3196-045-P1-M1-G10
ggagaaagggacatcatgtctttgttgtgtgcaagtgttttctccctgagacaggcaaggaacctgacatcaagaatggttcaacttaaagatgcttccttgtactcattctcatcctttgtatattttttgatctttcttcaagtaggatattaagaatttcctgtactattctttctggttgcttataaaattgtttgctcattagaaccttat

SEQ ID NO: 48002 - DNA, 368 bp, Gossypium hirsutum
  Clone ID: LIB3196-045-P1-M1-G11
gcttctgccgcgaacggagatgcaacattgtcatgaaagatcgattgttgctatggttctgcctccctcgtctttaacaactaagcctgacgctgatcggaagtttagtgagtcaaaagccgcgtcgaaatatatagccacgttcgccctttgtatttgctgtttgggtatcgcatttacttccaagataagtgccttattcttgataccgtccagttctgaaatgtaactattaatttgtttggagatatcttgactggtcttgacttgccttcatatattagcttgttcctatttgcccagatgagccaaagtccacaacaaaaaagtctgcattgctcattcgtcccttgattgaaaacccaaaa

SEQ ID NO: 48003 - DNA, 268 bp, Gossypium hirsutum
  Clone ID: LIB3196-045-P1-M1-G12
gacccctatgccacctttgtcaagatgctgccagacaaggactgccgctacgccctctatgatgcaacctatgagaccaaggagagcaagaaggaggacctggtgtttatcttctgggcccctgagtgtgcgccccttaagagcaaaatgatctatgccagttccaaggatgccatcaagaagaagctgacaaggatcaaacctgaattggcaggcaaccggttccaggaagtcaaaggaccgttgacccttggagagaaattggggg

SEQ ID NO: 48004 - DNA, 365 bp, Gossypium hirsutum
  Clone ID: LIB3196-045-P1-M1-G2
tattactaccctgagctcctctataatgtccaagccaaaagaaatttatgctttgttgtgccttatctttctctcctcctttacttgtttgaagcttgtatgcctcaccttaacctttgcttggggacattcaggccttgggcttctaggacaacgacttttctttcttccagcaagctgagttacttaagatgtgtaattatcaaccatgggaagatgattcaccttcaagtgaagatcgtgaaccaaggaccagaaatgtcacaaacactgtggcaactggatggcatccatgggaaaccagaatagcaatgttagaggcacggatagcaaggattgaggttcgacttgacggtcttgaaaca

SEQ ID NO: 48005 - DNA, 143 bp, Gossypium hirsutum
  Clone ID: LIB3196-045-P1-M1-G3
ataaatttgtctattttaaagtatagtctttgatggtaaaaatgtgaggttgacaaaaatcatgtcctcttatatgtatgaatttagtcttctttatacaattcttcctatgacggaatctaagacacaaatgtcctcaaaac

SEQ ID NO: 48006 - DNA, 371 bp, Gossypium hirsutum
  Clone ID: LIB3196-045-P1-M1-G4
ctccaccaccccctcagactctatctggtttttagggcttttctaacttttctgattattttttgataatccagagttcaatcatctaaaagaagccctaaaatctttgaatcaggtctgagcttgtggtttgttaggcctctttgatcaaactaagtttcatgtctgatcttgacgttcaaattcctactgccttcgatccctttgctgatgcaaatgctgaggactcaggtgcgggtgcaaaggagtatgtgcatattcgtattcagcagaggaatggtcgcaaaagcctgacaactgtccaggggttgaagaaagaattcagctataacaagatacttaaagacctgaagaaggagttttgctgcaat

SEQ ID NO: 48007 - DNA, 298 bp, Gossypium hirsutum
  Clone ID: LIB3196-045-P1-M1-G5
cggacgcgtgggattttaaagttcttttcgagtttttaattttcgacatcaagacattaagtaatcaactaggtaccaattttgggcgtatcgagggtgctaattcttcctcgtgcataaccgactcccgaatccattttttggattcttgtagaccgaaagcaatgttttaataaatcaaacaatttattaaaacgatcaaattgcgaggtgatccgatcacacctaataaaaaggatcgctggcgactccatgttcgttttcattttcaaaaatcaaaagtcgacccccttcttac

SEQ ID NO: 48008 - DNA, 388 bp, Gossypium hirsutum
  Clone ID: LIB3196-045-P1-M1-G6
atcgctgagatgggggcggcggcggcggaagcggatcggactctctttgtgggcaaccttgaaacgaaagtgaccgaggagctccttttcgagcttttccaccaggctgggccagtaataaaggtgaaaattccaaaagataaggatggtaaaccaaagcagtttgcgtttgtgaatttcaaacatgaagtatctgttccttatgcaatgaatctacttaatggaatcaaactttacggaaggcctatcaaaattcaatttagatcaggaagtagtcatgcctcgcaagatgtcagtttgtcatatccccagcatcatgttggaaattcaagccctaccttcacgtctcctagcagcaggtacgaaaggactatggataacatgactt

SEQ ID NO: 48009 - DNA, 346 bp, Gossypium hirsutum
  Clone ID: LIB3196-045-P1-M1-G7
gtgaggcagcggggagagatgggagagatgggagagaggagaagaaagcagtgacgccattgagggaaatgacaccagagaggatttttgggaagatgggtcacttgcagaggttgttagatcggttcttgtcatgtcggcctacaggattggcaaagaattgtaggatgatcttgattgctttatatcctgttgtgaaagagagttttcaattatatgcagatatttgcgaggttttggctgtgctgcttgataagtttttcgatatggagtacccatattgtgtcaaggcattagatgcatattcaagtgcattgaagcatatagatgagttgttttattttat

SEQ ID NO: 48010 - DNA, 333 bp, Gossypium hirsutum
  Clone ID: LIB3196-045-P1-M1-G8
atcgtcgggtcccgggaaccgaacccgaaggagaggagggggcccccatggatttaggggggaggggaaagccatgggggggcacccccccggaacccctttcccaggcgcgcgttctccgctgaaagaggctcagagagacactttctctgggatcttaagtgtgggggctgccagctggggggccagtccggcccaacgccggaggcttggaaaagagagttggcagagggagcggactacgtgccgggccatggcccttctgccggggccctggacacaatgacctctttgccctgcccccttcccggccgggacgcctccaaagctgtc

SEQ ID NO: 48011 - DNA, 366 bp, Gossypium hirsutum
  Clone ID: LIB3196-045-P1-M1-H1
ggatgtcatttgccaagctaaatcagggatggggaagactgcagtttttgttctatcaacactacagcaaattgaacctagtccaggacaagttattgcccttgttttatgccatacaagggagttagcttaccagatttgtcacgagtttgagaggttcagtacttatctgcctgatatcaaggttgttgtcttctatggaggtgtcaacatcaaagttcacaaagatctactgaaaaatgaatgcccccacattgttgttgggacacctggaaggatattggctcttactagagacaaggatctttctttgaagaatgtgagacatttcattcttgatgaatgtgacaaaatgcttgaatcact

SEQ ID NO: 48012 - DNA, 368 bp, Gossypium hirsutum
  Clone ID: LIB3196-045-P1-M1-H11
catttcccctaaattccgtcttttttcttcaaattccccacaaatggccatcactttctcagatctccacacggaatctggccttaaatcccttaatgacttcctcaccggcaaatcttacatctctggggataagctgactaaggatgacataaaagtttatgctgctgttttgaaaaatcctggtggttcatttcccaatgtgagccaatggtataattgtgtgtcttcccatctcgcttctagcttccctgggaaagctgttggcgtttcacttggtggcaaagctgatccagctcaatctgctgaagctaagtctcctgctgcggacgatgacgatgatgacttggatctgtttggcgatgaaa

SEQ ID NO: 48013 - DNA, 202 bp, Gossypium hirsutum
  Clone ID: LIB3196-045-P1-M1-H12
cccacacgtccgataataagatgtttttttagagcgccaaacaattaaaattttaagtttgacaaaaattgaattaaataaatgagatcataaaacccttaaaaaacctaataaaagggaataataatttattaaataataaattaccaaaataggaaataataattaatccacatattatataaaatacaaaaattaaatt

SEQ ID NO: 48014 - DNA, 358 bp, Gossypium hirsutum
  Clone ID: LIB3196-045-P1-M1-H2
ataaaaaatatataaatatagaaaaaattataaaattttataaagtcgtaagaaaattataaaaaatgaaagaaatataaaattcataaaaaaatataaaaattatcacaccaaaaagaaacattttataatttttctattaattttattgatttttattttttatcatttttgtgccacatgtcatgttgtgttacaacacgcaatggtattaactgaaaaaaaaactaggggttattagctttaacaattaatagtcaaagttaatggttaaagagaatttttgatgcattttataatttttaataattttaaaatatattttatatttttattaaaatttagtaatttttataac

SEQ ID NO: 48015 - DNA, 362 bp, Gossypium hirsutum
  Clone ID: LIB3196-045-P1-M1-H3
ggcatatcggatgaaaagggtacaccacgatgatccaatgaaggatttcttaaattgaaaagcatgttgataaatgtaagaacaaataaaatggatacttttagctattatgatatcgtcattgagttgtgatgaaaatcatatgttcttttgttttgtttgtgcgatacaccatgtattttcattctacatcaatgacataggtttcccctaaaaaaaaaaaaaaaaaaaaaaataaaaaaaaaaaataaaaaaaaaaaaaaaaaaaaaaaaggggccgccccttttgaagatcccagttttctttcccggtccttccgatctatatcttttttattggggcccccaaattcaattcactg

SEQ ID NO: 48016 - DNA, 364 bp, Gossypium hirsutum
  Clone ID: LIB3196-045-P1-M1-H5
gttttgcagtcggttagctgttttaaaggatgattttgctgttgcattaagtcacgcagatcacgttgtggttacagcggtttattcggtccgagaagcaggtccacggaatgtttgtggaaaggatttagctacttcaatcatcagttctacatccgaatacatcccctctctggatgacgtggttgataaactagcacttgagatatgcaaggaccctcttcgtgaaatcgttatattgacccttggtgcaggtgatgtcaatacagtgggtcctaaattgctgcacgaattgcaaaagagattatgcattgcataatggtaagcacaagcagcctttactggcataaagcaaagagagatt

SEQ ID NO: 48017 - DNA, 372 bp, Gossypium hirsutum
  Clone ID: LIB3196-045-P1-M1-H6
cccacgcgtccgataataagttgtttttttagagtgccaaataattaaaattttaagtttgtcaaaattgatttaaataaatgaaattataataccttatcaatactaattaaaagtaataataatttattaaaataataattacacaactaggcaaattttagtgatccacaaattttattgtatgtatcaattaaattttataacatttcaacaatactaatatttagaaaataataataaattaatataaacatttaatttttaaaagttgtttgatatgtagcccatttaccttcttatcaatttctacatggtttctgtgaaaaatcctattattgacttttctttatggactatgaaacatatatt

SEQ ID NO: 48018 - DNA, 205 bp, Gossypium hirsutum
  Clone ID: LIB3196-045-P1-M1-H8
attgctcggggacccaccttccacccagcacgggtccgttcccctctccgggcctggcccgggctccccggtggccgccgccccctcgccgcccccgccttctcccagggagggggtcaggtgggcgggcactattgttgtaggagcgggcgccagattcctcagccgcgctcggggtgggaccggctgggtttgggggggtggg

SEQ ID NO: 48019 - DNA, 360 bp, Gossypium hirsutum
  Clone ID: LIB3196-045-P1-M1-H9
cccacgcgtccgacaaagagcagatggaagtgcacacttaaggatggcatcatgcatataaacaataaagacattctctttaataaggcaacaggcgaatttgatttctgattttgttagataaaactgtagtcgccatcgtattgcagcagttgccctaaaagagcaagtcaaggggtgttattctgtgtttcgtaatttgtcttttaattattattagagtgaaaggttgattgaggggcatgggatatgctttattttaatgtcttccttaagacttgggttcgatggttgtcgtattgtacataaaggaagagagcattttcggccttagaatggatgactacttgagacagcttc

SEQ ID NO: 48020 - DNA, 329 bp, Gossypium hirsutum
  Clone ID: LIB3196-046-P1-M1-A10
gggatccccgcggttgagagcatgggttctacaggggccggtagagcgccgccggagttaccggagcggaactgtgggtaccgcgaagtccagtactgggatcagcgctaccaaggtgcagccgattctgccccctacgattgggtcggggacttatactccttccgtgcccccctagagccggagctgcggcccgaggaccgtattcttgtgttaggatgtgggaacagtgccctgagctatgaggctgttcttggaggctttcctgatgtgaccagagtggactactcgtcagtcacggtggctggcatgcaggctcgctatgttca

SEQ ID NO: 48021 - DNA, 286 bp, Gossypium hirsutum
  Clone ID: LIB3196-046-P1-M1-A12
atcaaacacctcaagaaaaggtaaaaaagcatggagagctaacataagcacagaagacatccatgatttcttcgagaaatccactaaagatgctctctctgggggttctcttacttcagctcctactgaatccctcttcttcatcgacaaatctcaagatctttctgtgaaaaaaaagattgagaagaaaagagaaaaggtattgcgtgtggatagtatgttgaagaagaacccttttgttgaagctgtaccatcttcgaagcaaaagagttctaagaagaaaaag

SEQ ID NO: 48022 - DNA, 362 bp, Gossypium hirsutum
  Clone ID: LIB3196-046-P1-M1-A2
atctttctgctctccacagtaggccagagttgggggctctggagctgtttcccaaagtgcacccacaggctggatctgagttttgtcactcaaaagcaagaagaaaagtgggaaaggggcatcccccattagatttcaatactttgcacttctactaagcttgataggacaggagtgcaatctacaattattttaaagtgaatttccttccatccaccattctttatctttttcttgaataagaagatatctagcaaggatattacttgtgccttgagggtagcaattacaggatagattcatataaaatacggtattctgtatttttttaagagaataataccaaacagtcttcaaagaaa

SEQ ID NO: 48023 - DNA, 369 bp, Gossypium hirsutum
  Clone ID: LIB3196-046-P1-M1-A3
tcgcccacgcgtccgtttgtcttttgcatcctttgtttgtctcttcatctcctgcactacttgcaaaataactcgctgaagccgtgctacaatggcactagcgttttcaacaattaattaatcagagccgcagcttgtttcttttaaactctaaatataaaggaggccaaacatgccgcctccgtaaataccaatttgggagggctgatgaggccactcatcccgactccatgagagccaccttggctgaattcctctccactatcattttcgtctttggcggcgaaggctcaattctcgctcttgacaagatgtacaaggatacgagtgcgacgcctgcaagactggtgatgatagcacttgcgcatg

SEQ ID NO: 48024 - DNA, 362 bp, Gossypium hirsutum
  Clone ID: LIB3196-046-P1-M1-A4
ggtgatagccggctgagcccggatgtggggcacctggtgctgaccaccctctgcccggccctccatgccctggtggcggatgggctgaagcctttccggaaggacctcatcaccgggcagcgcaggagcagcccctggagcgtggtggaggcgtcggtgaagccaggctccagcacccgctcccttggaaccctgtatagccaggtcagccgtctagccccgctgagcagcagccgtagccgcttccatgcctttatcctgggccttcttaacaccaagcagttggagctgtggttttccagtctccaggaagatgcaggccctgttttccttctgtaccctgcaacaggaattttttttcc

SEQ ID NO: 48025 - DNA, 416 bp, Gossypium hirsutum
  Clone ID: LIB3196-046-P1-M1-A6
atcgaacccagaagaaacgagggagcctgggtctcctcctagtgtgcagcaagctggcctggggtccccggaaagaccgccggagacaagcccaggatcaccccgtctgcaacagggtgcaggcttggagtccccccaagtgcagccagagccaggcccaggatccccccagcgtcagcaagacctacacctggagtcgcctcaaagacagccggagtcccgtcctgaatccccacgatgtcagccgaagtcaagtgaggaggcatcaaagtgttctcaggaccagggagtactggcctcggagttggcccagagtaaggaggagctgaccccgggggtcccccagcatcagctaccgccgggcccaggatcaccagagccttaccccggtcagcaagctcccggtccggagccct

SEQ ID NO: 48026 - DNA, 218 bp, Gossypium hirsutum
  Clone ID: LIB3196-046-P1-M1-A7
cgacaacgtgaaagccaaaatccaagacaaggaaggcatcccgccagaccagcaacgtctcatcttcgccggaaagcaactcgaggacgggcggactttagccgatttcaatatccagaagggatctggctttcaatctggtcctctcgtctttcgaggggggatgcaagatctttcttcaagaactttgaccgggtagaccattacttttaaaagtg

SEQ ID NO: 48027 - DNA, 374 bp, Gossypium hirsutum
  Clone ID: LIB3196-046-P1-M1-A8
caatggataagctttcaaaagtttgcaccttctacatctcaagtgccgacttctccaactttttttaaacttgtgaaacctttgcctccccaaaatttgcataatgatttgggcgtaaaagataaaggaagaggtgcagagtttgagtttgagagtggacaggtgaaaccatgggaaggagagaggattcatgacataggaatggatgatctggagctcacgctgggaagcggaaagcctcagtgttaaaccgagcctaatggtgtcgccaaagcatgttaaaaccaaagacaaaaaaaagctcacagttctgttcttcatctgctctgttctgtcttcttttatatcttttttggtttttttttggtcttttt

SEQ ID NO: 48028 - DNA, 355 bp, Gossypium hirsutum
  Clone ID: LIB3196-046-P1-M1-A9
ctttttgacgaatttgcagccagtttttgagtcttgtttgcagctcaaggtgttaaaattacaagcatgcaagtatctggcggactcatcattggagcccctttacaaggaaggtgctttacgagaactccgggatttggacttgtcatatggtaccctgtgccagtctgccatagaggagcttcttgcttattgcacgcatcttacccatgtgagcttgaatggatgcataaatatgcatgacctaaattggggttctactggtggtggatttgaatcacttaacggatctagcatgtttccttttgagaacatgaacgactcaattgagcaaccaaatcgtttactgcagaac

SEQ ID NO: 48029 - DNA, 378 bp, Gossypium hirsutum
  Clone ID: LIB3196-046-P1-M1-B10
ctaacattcagccaaggtgtaaatatgagagctggtatcaataaaattgcacttctaagcattgctgttggtcttccggtatgcgctctccctccctccctctctctctctccttctctgctcttgtgattttggaatttctttgactgactgaatatttggtttgaatgcagaacgttggtccacattttgagacatggaatgccggtgttcttggcccggttacactgaatggcctcaatgagggaaggagagatctctcgtggcagaaatggtcttacaagattggccttaagggggaagcattgaatcttcattctctaagtggtaggtcatctgtggagtgggcagaagggtcgttagtggcacaaaagcagc

SEQ ID NO: 48030 - DNA, 389 bp, Gossypium hirsutum
  Clone ID: LIB3196-046-P1-M1-B11
gggggtttgtaataggattcataagagggcccgaactaagcaaaccttataagtgttgaatgatgggaaggtttctaagaggcgcccagctatcactggcgaactaaaaaatgtcttaaccaatgttgaagtgaagacgccttataaattccgagcggcaactgtagctttttaataacttcggaaccgccccaatagttctgcccttcttatcacggaatcctcgttccagatatttgatcgggaaaatgcccagaccaaaagactgaattgtgcacacagagccatgccgatcttgctcttgatgaagctgcagaagcataccttgtgggcttaattgaagacaccaaccagtgtgcgacacacgccaagcgagtgactataacgcc

SEQ ID NO: 48031 - DNA, 390 bp, Gossypium hirsutum
  Clone ID: LIB3196-046-P1-M1-B12
cctgcttcctctgctgatgttttcaacccacgaggtggtcgcatcaccacagttaacagtttcaatcttcccattctccaatacctccaactcagcgccgagaggggagtcctttacaataatgctatctacgctcctcactggaacatgaatgcccacagcattgtttacatcacaaggggaaatggaaggattcaaattgtgtcggaaaatggagaggcgatattcgatgagcaggttgagaggggtcaggtcataaccgtaccccagaatcatgcagtggtgaaaaaagcaggaaggcgagggtttgaatggatagcattcaagacaaatgccaatgctaagattagtcagattgctggacgtgtctccattatgcgaggattgccg

SEQ ID NO: 48032 - DNA, 383 bp, Gossypium hirsutum
  Clone ID: LIB3196-046-P1-M1-B3
cccacgcgtccgcccacgcgtccgctcagtcaaaagacgttttacattattttcttctctcacgcctcctctgccattctcttattctcttcgataacttttctccccccatctttgatatcttcttctttttcttttttcccccttcttttacctaattgcttcccaaatgtctcttcagattgcttgggacttaatactgaattttaagtaaaagtgcacgtgtagagatgaggttttccatttcccttcatcttctccactgctaaccagcgaaaattctactcgataatggaactcaaatattgcattaagggattgttgtatttggtgggagtggtagaacatcgaattcgggttttcagaacggatggatacggata

SEQ ID NO: 48033 - DNA, 394 bp, Gossypium hirsutum
  Clone ID: LIB3196-046-P1-M1-B5
cggacgcgtggggaaagaacttgaggaacatttccatgggcttgagaagtccttgaagagacgcttccatgaattagaagaccaagaaaaggagtttgagacaaaaactaggaaatctcgagaaatgttgaagaagcgtgaagctgctgttgttgctaaagaacaagcttcactagtgaggttacaagaaaagagagatgctgctgtttttgccattagtaatgctctagaaaagcataggaaagtatcacctgaggagcctgctgatagctgtgatggagacagtggtgaactgtcagttgaggagaaaccccctgattctgtagcttccgaaagtaactcagaggatataaaatgttcttctgaaaatggaaatttcggggtgaaatcttat

SEQ ID NO: 48034 - DNA, 398 bp, Gossypium hirsutum
  Clone ID: LIB3196-046-P1-M1-B6
tctaattctaaagctaagagttttaagttaacgaagcatttgggtcgtttcgaagtaatggaaacttcaggaaaagtaaagaagggagccggaggaaggaaaggtggtggcccgaagaagaagcccgtttcaaggtctgtcaaagctggtctccagttccccgttggtaggatcggccgttacttgaagaaaggaaggtattcacagcgtgttggaaccggagccccggtttacttggctgctgttcttgagtacttggctgctgaggtcctggaattggctgggaacgctgcacgtgacaacaagaaaaacaggatcatcccaaggcacgttctacttgccgtgaggaacgacgaagaattagggaagcttctcgccggcgtaacaatcgctcacgg

SEQ ID NO: 48035 - DNA, 348 bp, Gossypium hirsutum
  Clone ID: LIB3196-046-P1-M1-B7
atcctgaccgccactattgaaaacaaccgggtcatcctggagattgacaatgccaggctggctgcggatgacttcaggctcaagtatgagaacgagctggccctgcgccagagcgtggaggctgacatcaacggcctgcgccgggtgctggatgagctcaccctgtctaagactgacctggagatgcagatcgagagcctgaatgaggagctggcctacatgaaggagaaccacgaggaggagatgaaggaattcagcaaacccaggggtcgggcaggtcaacgtggagatggatgccaccccgggcattgacctgacccgcgtgctggcggagatgcgggagcagta

SEQ ID NO: 48036 - DNA, 375 bp, Gossypium hirsutum
  Clone ID: LIB3196-046-P1-M1-B8
gagttgctgactttgttcatggctctgatggaatggggaatatatttctacctcctccaaaaacagagaaatctgataagagtgcctctgaatttttagttgaaaaggtctctcagtaccctggtgaagtatccatacttgcacttggaccactgacaaatgtggcattggcaatcaaaagagactcttcctttcctagcaaggttaaaaaaatagtagtacttggtggctcattctttgcattaggaaatgttaatcctgcagctgaagcaaatatttatggtgatcctgaagcagctgatgttgtgtttacttcgggagcaaatatcgttgttgtcgggataaacattactacacaagtccaaatgacagatg

SEQ ID NO: 48037 - DNA, 374 bp, Gossypium hirsutum
  Clone ID: LIB3196-046-P1-M1-B9
gtgcgagcagccgcagccagcaagcagcagtagcaacagcaggagcggaagaatgtctcacaggaaatttgagcacccaaggcatggttcccttggatttcttccaaggaagcgagcctctcgtcacagaggaaaagtgaaggcattcccaaaggatgaccctaccaaaccttgcaagctcactgcctttctggggtacaaggctggtatgacacacattgtcagagaggtcgaaaaacccggatctaagcttcacaagaaggagacatgtgaagctgttacaatcattgaaacccctcctatggtgattgttggggtggttggatatgtgaagacaccacgtggccttcgctccttgaacaccgcctgggctc

SEQ ID NO: 48038 - DNA, 395 bp, Gossypium hirsutum
  Clone ID: LIB3196-046-P1-M1-C1
atgcacctacaccagccaacccagatcccgaggtccaacagcgcccggcccagatccccacgcctgccagtagcaagccgagagccagccggccggcgcactccgactccgagcagtctccgtccttctgcccgagccccgagccctttccgggacccctgccccgcgggcagcgctgccaacctgccggccatggagaccccgtcccagcggcgcgccacccgcagcggggcgcaggccagttccactccgctgtcgcccacccgcatcacccggctgcaggagaaggaggacctgcaggagctcaatgatcgcttggcggtctacatcgaccgtgttcgctcgctggaaacggagaacgcaaggctgcgccttcgcatcaccgagtctgaaga

SEQ ID NO: 48039 - DNA, 391 bp, Gossypium hirsutum
  Clone ID: LIB3196-046-P1-M1-C10
gcttagctctcattgccttatcccttcaaacatgtcccaaggcctcaatgcccaaaaccactatacatataagtgagtactcacactcctatagcatgccaactatatccaattgttctaaggtctctataatagcccgtttcagtgaaatttgaacagtggtttcggaaccataaatccaatgtaaaaatatttattttattattattttaatgtctacagcatgttagtattaccttataaaaattttgttaataaattttatcgtttgcatactgaatttgataaaaaaaagagactaaattacataaagtgcaaaactagagttttatagacctaaaggcattaaatagctatagaaccttaaagtatgagtccttacgtggtaaat

SEQ ID NO: 48040 - DNA, 259 bp, Gossypium hirsutum
  Clone ID: LIB3196-046-P1-M1-C12
atcgccattctctggcctaattctggtgagtagttgttactagaggggccaggcaccacgcccagataattcaattgtataaatattaaagacgggggcttaccaaattagacaggatgagatcaatctccagacctcgagattcacccaccttggactacaaagggctgtgattacaagctagagccaccacacccagtctgaaaatattaatatagaaaaggtgctgccaaggtcttctaatttaatgcagattcac

SEQ ID NO: 48041 - DNA, 439 bp, Gossypium hirsutum
  Clone ID: LIB3196-046-P1-M1-C2
caagtttgtacgctgaagcacgctggtgccgcgccgcgatttccgggatgaaacacactacttgctggtgataacaaaaaggattccactgagccaccctacagccagaagagatacaacggaattggttaggaagtcagcacttacattaagaaaactggctacaacccggacacagcagcatttgagccaatttctggccggaatggggacaacatgctggagccaagtgctaacatgccttggctcaagggatggaaggtcacccgttaggatggcaatgcccgtggaaccacgctgcttgaggctctggactgcatgctaccaccaactcgaccaactgacaagtccttgcgcctgcctattgcggatgtctacaaaattggtggaattggtactgttcctgctggcccagtggagactggtgttctcaaacccg

SEQ ID NO: 48042 - DNA, 386 bp, Gossypium hirsutum
  Clone ID: LIB3196-046-P1-M1-C3
cccattttgaccatgcctaatgatgatataacacatcctacaccagatctgactggttatattactgaagggcagatttacattgatagacaacttcacaatcgacagatatacccaccaattaatgtactcccttcactctctcgattaatgaagagtgctattggtgaggggatgactcgtagagatcatgctgatgtgtccaaccagctctatgcaaattatgctatcggaaaagatgttcaagcaatgaaagctgtagttggagaggaagcactttcttctgaggatctgctttatctggagttcctagacaaatttgagagaaaattcgtgactcaaggtgcttatgatactcgcaacatcttccagtcgcttgatctaac

SEQ ID NO: 48043 - DNA, 295 bp, Gossypium hirsutum
  Clone ID: LIB3196-046-P1-M1-C4
gcgtaccgttcctgtataataacaccaggacaatatcgaggagattgttctagctgtaagccaacaccctcatgtgtatacactagcctttacaggagaaatttttgggccagacttcaatacacgaagggagcagctacacaagctgtgtggtgtgaggcaaagccgtctgacgtagcagggacagggaatgtttgctaaagacagtcaggaactaagtgcggcattgagctatgtcgctgacataccaagggagaaaagttgcgagagaagcgccttcaacttattgagccaa

SEQ ID NO: 48044 - DNA, 397 bp, Gossypium hirsutum
  Clone ID: LIB3196-046-P1-M1-C5
aaataaataaacagccaagagattttgcagtagagtttaacagaagctatgtaaaagctcgttaatttgtgtttttttaaaccagtgtgagaaacatagatcttagtaaaaattagttgaggacttaatgaagaattgctcattaaataactgacagtttgttcctttctttgaagattgcttgttcttgttcaattagaaaggagaaagttacctccatgtggcctaaaacacgagatttcttaagaggaaaaggccgtactcctttagaattaagctcatgagagaagcttttcacgtcaggagctttcttcctacggccactggtaacgcgcagtacggcctggaaacgtggtgactgcatttccttggcaaaaccaacatgattactccacca

SEQ ID NO: 48045 - DNA, 391 bp, Gossypium hirsutum
  Clone ID: LIB3196-046-P1-M1-C6
ggcatggtcagtttggcattgatttgttcgttttcaaagatgagaagccatttgaatttaagggatgtgaaggcggaagaagtgccagaggctactttgaatgtcgttgctgaaactctcagaacttcctcttccctcagggtttctgaagacgggaagaaagttggtagaagcactgcactattagagcctgaagaattgttagagcaattagacagtagaacaattgctgcatcaccatttgagtttaatgtcaagatggaagctgtagaagccttttttggtcaatatgctaaggtaaatagtgtgaggttacctcgtcatgtagcaaacaaaaagtatttttgtggcactgctttaattgaattctcagctgaggaagatgcacaaa

SEQ ID NO: 48046 - DNA, 374 bp, Gossypium hirsutum
  unsure (1)..(374): unsure at all n locations; Clone ID: LIB3196-046-P1-M1-C7
cggacgcgtgggctcccgtggagatgtaactatactgccaacccttgtgataaacaacagacagtatagagggaagttggacagaggagctgttctcaaggcaatttgtgcaggttttcaagagaccacagagccagcaatttgcttaactgaagatatacaaactaacgagtgcttagaaaacaatggtggttgctggcaggacaaaagtgccaacataactgcatgcagggatanccttccgggaagagtgtgcgaatgcccgttagttaatggtgtgaagttttctggagatggttatacacattgtgaagcttctgcggctttacgctgtgaaatcaacaatggaggatgtttgagagaaacacgggaag

SEQ ID NO: 48047 - DNA, 102 bp, Gossypium hirsutum
  Clone ID: LIB3196-046-P1-M1-C8
attagcatcaaatataatagcccatttcttcccactttgaatttatgcatccatttaatcatagtttgtttaagcactcatacaacaagattcatccaattt

SEQ ID NO: 48048 - DNA, 369 bp, Gossypium hirsutum
  Clone ID: LIB3196-046-P1-M1-C9
cccacgcgtccggtttgtgggaaaagctccgctaaaagtcatgacctttggcggcactgtcattagcagcgtcataagcgccgcaaatgcttttagcggcacttttttaaaggcctattttggtgtagtgacgaaatcatgcaaacatccccaaatgaacatattaaattttggtggtaaggacagattccaaagagttaaccaaggaccactcaacatactgttgcgaaagcgaagtgttgacttgaatagctaaatggtaccccgacttcacactatataaattgtctttagtaaagtgctagataaaataatcggtcagtttaagcatagcaaccgtgatactaaaaattgttaattagaatcgac

SEQ ID NO: 48049 - DNA, 376 bp, Gossypium hirsutum
  Clone ID: LIB3196-046-P1-M1-D1
atcacccctgcactccagcctgagtgacagagtgagattgtcttaaagaaaaaaaagctcttcccagagattttcaccaagtttttctttcatctttaggcaccttgacagcagtagcaatgagcgtccagatattagttccatccagagacgtattaaggtatccaaatgggatttgggagaaaacttgggaaataagtttaaatgattttttcacgtttctgatttttacagagactggcattcaactactgctcaataaatatttgttgaatgagccaagaatcaatcttgttctttgttttagaaagtaactcatgacatggacatgtgctatgggatgatgggaagcctgtttcgcagtggctcccggcag

SEQ ID NO: 48050 - DNA, 379 bp, Gossypium hirsutum
  Clone ID: LIB3196-046-P1-M1-D10
cccacgcgtccggtttctataaaaacccgaaccagaaaaccctaactcgtcgttgttattttctctcgaagagccgctcctcaccttccggaccagacaggcgcagatcctctcagcccagcgaccatgacaaagagaacgaagaaggccggaattgttggaaaatatggtacccgttatggtgccagtttgaggaagcaaattaagaagatggaggtgagtcaacacagcaagtacttctgcgagttctgtggaaagtatgcagtgaagagaaaggctgtaggaatctggggctgcaaggattgcgggaaagttaaagctggtggtgcttatactttgaacactgccagcgctgtgacggtgaggagtactattagga

SEQ ID NO: 48051 - DNA, 374 bp, Gossypium hirsutum
  Clone ID: LIB3196-046-P1-M1-D11
atgggagattgattggaattccatttaaaattttggtatatggcattttctaacttaggaagccacgatgttcttggcccatcatgacactgggtagcattaactataagttttgtgcttccaaatcactttttggtttttaagaatttcttgatactcttaaagcctgccttcgattttgatcctttattctatttgtcaggtgcacaagattaccttccttttttagccttctgtcttgtcaccaaccattcctacttggtggccatgtacttgggaaaaggccgcatgatctttctggctccactcagtgtctaaggcaccctggtttcttttgttgcaccccacaaactattttcctcattctatttact

SEQ ID NO: 48052 - DNA, 381 bp, Gossypium hirsutum
  Clone ID: LIB3196-046-P1-M1-D12
catagattctacctttgtaaagtcgtcatgaatttaacataattatatttgagttgagaaaataatttaattaggaaaaataattaaatttattttaattaattaattaatattttttatacatgcatagatggggtgaaatttattaaatttcattcaccgaagctgtcaattttaaagtttagaaaatcagttgacttgcgatgacttttgggatgggatctaagcatttctgagttgagatgtcttcatagagtttgaagatctatcttagctttgaaatgcattttgaatcactcgattttgagtttgaaagctcaagttatgaccgttttagtgaagattgtgcgagcaaaatacaagaattactagtcctagact

SEQ ID NO: 48053 - DNA, 366 bp, Gossypium hirsutum
  Clone ID: LIB3196-046-P1-M1-D2
cggacgcgtgggcggacgcgtgggaaaaaattccacatgtaagcggagttaaaatcttcataatttgggtcaactcctctagacagtatgcttaacccagggtagtcaatggaactttatggtattcaggaggttaatagacatccttaccttttttgtcgcattacttctatttctgtcatctttttcagattccaacttttttggaatgttttttagggaggggacttgagatattgccaaaagtgttctcattacaagccctcatccacacatcattgccgtgtttgacagcagtgctacaagagaatggtacgtgcactttatcaccaacgaaatgcatgcttcatgtggatgcgttctaaa

SEQ ID NO: 48054 - DNA, 392 bp, Gossypium hirsutum
  Clone ID: LIB3196-046-P1-M1-D4
cccacgcgtccggaagaggaacaattacgttcgtgacacatgaaaacaaagagtcatacaatgtagctcctggagttgtagtaagaattccagcaggaagcactgtgtacttggccaaccaagacaacagggaaaagctaaccatagcagtgctccaccgccctgtcaataaccctggacaattccagaaattcttcccttctggacaggaaaatcctcagtcatatttacgaatcttcagccgtgaaattcttgaggctgtcttcaatacacgaagtgagcagctagacgagctgtttggtgggaggcaaagccatcgaaagcagcagggacagggaatgtttcgtaaagccagccaagaacaaataaaggcattgagccaagaagctact

SEQ ID NO: 48055 - DNA, 409 bp, Gossypium hirsutum
  Clone ID: LIB3196-046-P1-M1-D5
atgtggctcactccctttcctctgttgcctctcggtcacgcttgctctttcaccatgcctggatcgcttcctttgaatgcggaagcttgctggccaaaagatgtgggaattgttgcccttgagatctattttccttctcaatatgttgatcaagcagagttggaaaaatatgatggtgtagatgctggaaagtataccattggcttgggccaggccaagatgggcttctgcacagatagagaagatattaactctctttgcatgactgtggttcagaatcttatggagagaaataacctttcctatgattgcattgggcgactagaagttggaacagagacaatcatcgacaaatcaaagtcagtgaagactaatttgatgcagctgtttgaagagtctgggaataccg

SEQ ID NO: 48056 - DNA, 446 bp, Gossypium hirsutum
  Clone ID: LIB3196-046-P1-M1-D6
gtttgtacgatgatgcgggctggtgccgggccggaatttccgggattgagtacctactgtgtgccaggagctggtggtgcagtgttgacatagtctgctgccctgatagagttgattgtctagtgaggacgacacgcatttttaaaaaatatattgaaacttacaaaccttgtttgtgacaagtggtgtgtattgcaataactgcttggtttgcaacctaatttgctcaacagagacatatgttgcaagacccttccatggcggcacttgcgttttggcaaagctgagagagctctgggttgggcacattgctttggattacaactgttaatctgcgcctttctacaactgattgcaacagactcttgagacatgataactacagagggaattgctggagacaccagaggcacttgcatctcggctgggaagactatggtgctggc

SEQ ID NO: 48057 - DNA, 378 bp, Gossypium hirsutum
  Clone ID: LIB3196-046-P1-M1-D7
ccatttcacagaaggcagaaaacagaaatggtgtgtttgaagctgcagaagcggctagccgctagcgtcctgaagtgcggtcgcggcaaggtctggctcgatcctaatgaaatcaacgaaatctccatggccaactccaggcagaacgttaggaaacttgtgaaggatgggttcatcatcaggaagcctactaagattcactcccgctctcgcgcacgtaggatgaaggaggccaaaagaaagggaagacactctggatatggtaagaggaagggtaccagggaggcaaggttgccaacaaagattctttggatgaggagaatgcgggtactgaggcgattgtttcgtaagtacagggaattcaagaagattgacaag

SEQ ID NO: 48058 - DNA, 375 bp, Gossypium hirsutum
  Clone ID: LIB3196-046-P1-M1-D8
cccacgcgtccgcgttgaggcagctttgaagaccagttttagaaaggaaatggctttgaaaccaagcccccaggcgtttttggaggatatttgggttgttaatggacaaaatggggtgtcttgcgatgatttttcagttgacgacctctttgacttcagtaacgaagagggtttccttcaacagaaacgtgcggatgaagaagatgaggaggaagaagaagtaccagcttcttcttctttgcctaagagacaaaagctaagccaagacaacggccacttctctaacgacagtactacaaatttcgattatggttccttgtccaccaacgaactcgctgttccggcggatgacgttgagaacctcgaatggctgtc

SEQ ID NO: 48059 - DNA, 378 bp, Gossypium hirsutum
  Clone ID: LIB3196-046-P1-M1-D9
gagtattagcaattgcagtcccaacaagtctgctagatcaatggagggttttacaacaagaacaaaggcatccgctcaacctttggagaacgccgacgagcttatcgcctccgtcgagactttcatctttgattgtgatggagttatatggaagggtgataaattaatagatggagtccctgaaactcttgatatgcttcggtcaaagggaaagagactggtttttgtcacgaataactcaaccaaatccaggaaacaatatggtaaaaaatttgagacacttggcctgaatgttaatgaggaggaaatttttgcttcttcatttgctgctgctgcatatttgaagtccattaatttcccaaaagataaaaaagttta

SEQ ID NO: 48060 - DNA, 157 bp, Gossypium hirsutum
  Clone ID: LIB3196-046-P1-M1-E10
tcggtctgtacccaccaaaaatgcgaggaatgatttcctggggggggtgaagatcatgtcatggctcatggacccaaacatcattcggctgctagatcgagtgtgatcaagacgaccccttctgcatgaattctgactttcatggagaacggtgacc

SEQ ID NO: 48061 - DNA, 392 bp, Gossypium hirsutum
  Clone ID: LIB3196-046-P1-M1-E12
ggaagctggcccccatgtcctctggctgaaagcagcaacccctccccaaaaggccaggcaatgtgccgccccaccccaccttctaggcataggactaagatttacagaagccaaatgtcatagcctcgctttgttctttgttaggcatttcctcctgtctctgagggaggggaaggcttctattagaagaacatactttccaagagctataaatttttcacctctacaaagaccaggcaattatctaacctaatcctaaacaatttaaaggataaaatgaaggtaatcaagatggctcttccagaaaactgtacttgcactgggagacaaacgtcccaagccttggggtctgggacaagccttcaacactgccagcctcaagtgaagctttt

SEQ ID NO: 48062 - DNA, 350 bp, Gossypium hirsutum
  Clone ID: LIB3196-046-P1-M1-E2
atcctttgggcagtgggggttggtcccgtggctccggcccccggtgcagaatggcggcggcggttcggatgaacatccagatgctgctggaggcggccgactatctggagcggcgagagagaggtgcacggggacgggaaggggtccactcgaaccgaggccgggggtcctgtagggccggcctcaggtccgggcgcccagccgctccgggggtggttggaggcggggagaccgcgagcgcttccaacccctccggctctccccacgcgcggtccgaagggaggccgtcgctgccctagagcaatgaatcaggtggagaaagggctttcgcctcgcggggtcccgaacgc

SEQ ID NO: 48063 - DNA, 341 bp, Gossypium hirsutum
  Clone ID: LIB3196-046-P1-M1-E3
cccacgcgtccgctcccaatggggggtgcagccaactgaggcaagggtttgccagtcacaaagccataagttccacggtgcatgtgtgagtagccacaactgtgcgatggtgtgcagggacgaaggtttctccggcggcagatgtcgaggattccgtcgccgctgcttctgcactaagctttgctaatgcaagcttgcccttagctcatattttaaggatttttcttgagtaaaagacctttatgtttttcgtgcatgcatgtcaatgtttcaataaggtatctcctaattacttctgttttgggagatcattttcgtctcttttttatgcctttaaaggg

SEQ ID NO: 48064 - DNA, 409 bp, Gossypium hirsutum
  Clone ID: LIB3196-046-P1-M1-E4
atcgccatgggccgtgtgatccgtggacagaggaagggcgccgggtctgtgtttcgcgcgcatgtgaagcaccgtaagggcgctgcgcgcctgcgcgccgtggatttcgccgagcggcacggctacatcaagggcatcgtgaaggacatcatccacgacccgggccgcggagcgccgctcgccaaggtggtcttccgggatccgtaccggtttaagaagcggacggagctgttcattgccgccgagggcattcacacgggacagtttgtgtattgcggcaagaaggcccagctcaacattggcaatgtgctccctgtgggcaccatgcctgagggtacgatcgtgtgctgcctggaggagaagcctggagaccgtggcaagcttgcccgggcatcagggaactatgcca

SEQ ID NO: 48065 - DNA, 331 bp, Gossypium hirsutum
  Clone ID: LIB3196-046-P1-M1-E5
ctttttgacgaatttgcagccagtttttgagtcttgtttgcagctcaaggtgttaaaattacaagcatgcaagtatctggcggactcatcattggagcccctttacaaggaaggtgctttacgagaactccgggatttggacttgtcatatggtaccctgtgccagtctgccatagaggagcttcttgcttattgcacgcatcttacccatgtgagcttgaatggatgcataaatatgcatgacctaaattggggttctactggtggtggatttgaatcacttaacggatctagcatgtttccttttgagaacatgaatgactcaattgag

SEQ ID NO: 48066 - DNA, 385 bp, Gossypium hirsutum
  Clone ID: LIB3196-046-P1-M1-E6
tggtcaaagaagaattctgttctctggttctattcattatcccagaagcacacctgatatgtgggaagatctgattcagaaagctaaagatggtggacttgatgtgattgagagttatgttttttggaatgtccatgaaccatctcctggaaattataattttgaaggaagatatgaccttgtgagattcataaaaacagtacaaaaagcaggtctttatgctcatcttcgtattggaccttatgtttgtgctgaatggaactttggagggttccctgtgtggttaaaatttgtgccaggcattagcttcagaacagataatgagcctttcaagagagctatgcaagggtttactgagaagattgttggactgatgaagagccat

SEQ ID NO: 48067 - DNA, 359 bp, Gossypium hirsutum
  Clone ID: LIB3196-046-P1-M1-E7
atggcagagagaacaggaaatcttgaaacaactaaattctggatacaaataaatagatggagtaacttattcagcagatttgaaagggttcatttccaggttttcagtggggaaagctaagaatcaacccaaattgaattgtagaaccaccaaaatgtctcaggaattagtagtgctagctaccttgaaagtagagcaattaaatcactacccctgtccccttagccaaagatccatcttctccctggaaaggataaaaccataactccactggggagtactataattagtgaaactaagtgtactgtactcaaaacagggaagagtaaaagcatacttgaatggtaagtgtttttttt

SEQ ID NO: 48068 - DNA, 383 bp, Gossypium hirsutum
  Clone ID: LIB3196-046-P1-M1-E9
atcggccagatgccaccaagaatgccaggaatgatttcctgaaagaggtgaagatcatgtcaaggctcaaggacccaaacatcatccggctgctgggcgtgtgtgtgcaggacgaccccctctgcatgattactgactacatggagaacggtgacctcaaccagttcctcagcgcccaccagctggaggacaaggcagctgagggggcccctggggatgggcaggctgcgcaggggcccaccatcagctacccaatgctgttgcatgtggcagcccagatcgcctccggcatgcgctatctggccacactcaactttgtacattgcgacctggccacgcggaactgcctagttggggaaaatttcaccatcaaaatcgcagac

SEQ ID NO: 48069 - DNA, 394 bp, Gossypium hirsutum
  Clone ID: LIB3196-046-P1-M1-F1
gggatggagccgaagcagcagcgcaggttatccccgtttcccctcccccttcccttctccggttgccttcccgggccccctacactccacagtcccggtcccgccatgtcccagaaacaagaagaagagaaccctgcggaggagaccggcgaggagaagcaggacacgcaggagaaagaaggtattctccctgagagagctgaagaggcaaagctaaaggccaaatacccaagcctaggacaaaagcctggaggctccgacttcctcatgaagagactccagaaagggcaaaagtactttgactcaggagactacaacatggccaaagccaagatgaagaataagcagctgccaagtgcaggaccagacaagaacctggtgactggtgaccaca

SEQ ID NO: 48070 - DNA, 364 bp, Gossypium hirsutum
  Clone ID: LIB3196-046-P1-M1-F10
attggaaacaggctatagcgcttactcctggtaattatattgaagcgcagaattggttaaagatcacgcggcgtttcgaataagaacaagagctctctgtttatttattattattttagttttaggattcgaaattcgaattagaaattagagaattctatttaattctatttctatttaatttctattaaatccatttatttaatatttaatttaattaaataaattacggtactatttaaattattaaattcgattttctagtcaatttgaatatttaaattaaatagtaaaaaatattaatttaattggaattgttaattgtgtaatggtttggtttcgtggacccatgggtcaaataaaa

SEQ ID NO: 48071 - DNA, 371 bp, Gossypium hirsutum
  Clone ID: LIB3196-046-P1-M1-F11
caaggacacagagactggttcattcaggggaagtggagaacaaaagagacagatccgctttatcatcccgagatggaaatgcgaaagcaacacaagtggagtggaggaggtgattttgtgttgcgttaaggggttgaagattcatatgctttgcggatatttgtatttattctttgatgtaggataaaagaagtatgctatgaaactgaaacagggtattatacccgaaggtgtgtgctgctggccgattgcctctaaagttttctttttctgggagtttgtgtatagaaatagaatacggtttgaacttttagcttttaaaatttgggtaaagttcctaagttgtctgtatctgttttaggaggttgttt

SEQ ID NO: 48072 - DNA, 391 bp, Gossypium hirsutum
  Clone ID: LIB3196-046-P1-M1-F3
atgcaaccacatcaagctgtcgggcagcaacccctacaccactgtcaccccgcagatcatcaactccaagtgggagaaggtgcagcagctggtgccaaaacgggaccacgccctcctggaggagcagagcaagcagcagtccaatgagcacctgcgccgccagtttgccagccaggccaacgtcgtgggcccctggatccagaccaagatggaggagatcgggcgcatctccattgagatgaacgggaccctggaggaccagctgagccacctgaagcagtatgaacgcagcatcgtggactacaagcccaacctggacctgctggagcagcagcaccagctcatccaggaggcccttatctttgacaacaagcacaccaactacaccatg

SEQ ID NO: 48073 - DNA, 402 bp, Gossypium hirsutum
  Clone ID: LIB3196-046-P1-M1-F5
atcccagcaatatgcatcttgcacatctggtcagctcctgctccctccttctgctactgggggccctgcctggatgggcggccagcgatgaccccattgagaaggtcattgaagggatcaaccgagggctgagcaatgcagagagagaggtgggcaaggccctggatggcatcaacagtggaatcacgcacgctggaagggaagtggagaaggttttcaacggacttagcaacatggggagccacaccggcaaggagttggacaaaggcgtccaggggctcaaccacggaatggacaaggccggaaaagaagcagacaaagcggtccaagggttccacactggggtccaccaggctgggaaggaagcagagaaacttggtcaaggggtcaaccatgctgctg

SEQ ID NO: 48074 - DNA, 396 bp, Gossypium hirsutum
  Clone ID: LIB3196-046-P1-M1-F6
aattcagttaagagtggagttgtgtacatggggaatgactcacttagtaaagtaatcagtgttggtactatttagatcaagatgcacgatgggataattaggacattgtcaaatgtcaggcatatgattaacttaaagaaaaatctcatctcctttggaaatttggaccagaagggttgtaaaattaacatcgagtcaagcgtcattaaagtatctcgtggggctttcattttgatgaaaggtaaaaatattgacagtctttatgttctagaaggatcaacgatgacccgtaaaataggacgtccatcgtctgttaaggagtcgaagttgactcatttgaagtggagacaacttggccataggagggaaaaaagtataactgtttcgtttaagaga

SEQ ID NO: 48075 - DNA, 396 bp, Gossypium hirsutum
  Clone ID: LIB3196-046-P1-M1-F8
atccaggccaagcaagcttctgtctgcacctgctctcaatcctgctctcaccatgagcctccgcctgcagagctcctccgccagctatggaggtggttttgggggtggctcttgccagctgggaggaggccgcggtgtctctagctgttcaactcggtttgtctctgggggatcagctggaggctacggaggcggcgtgacctgtggctttggtggaggggctggtagtggctttggaggtggctacggaggtggccttggaggtggctttggtgggggttatgctggtggctttgttgattttggtgcttgggatggtggcctccctactggcaatgagaagatcaccctgcagaaccttaacgacccgctggctttctacctggagaaggtgcg

SEQ ID NO: 48076 - DNA, 361 bp, Gossypium hirsutum
  Clone ID: LIB3196-046-P1-M1-F9
agattatgatagattgagagaatctattgacttgcatgataactttgatcagattggccttgctcaaaagattgagaaacatgaactacttgagatgagacgtgttgccgcatacatatacaaaaaggcgggcagatggaagcagtccattgccttgtcaaagaaagacagcctttacaaagatgctatggaaactgcttcacagtctggtgatcgtgaacttgctgaggagttgcttgtttacttcattgagcagggcaagaaggaatgttttgcggcatgcctctttgtctgttatgacttaattcgaccagatgttgctcttgaaatggcctgggttaacaatatgatagacttcaca

SEQ ID NO: 48077 - DNA, 331 bp, Gossypium hirsutum
  unsure (1)..(331): unsure at all n locations; Clone ID: LIB3196-046-P1-M1-G1
gttttagtacatacctgtgccatcgtgcacacatatggcttacttaaattttactttcagaattcatattacgttacccgttaaacacttggaatatgattcagacacacggaacaaatgcacagaagtgcctaaacatagccttggctacttgacaaaaagtgtactgaagtgcctcatatcacagaatcacatgctgctctcaacggngctactcaaagagctaagagagtatctgaacacaactcangatacccagcaccaggaccctagcatgtatcacatattaaatgagctcaatacacacatgactatcctagtgacatgtcac

SEQ ID NO: 48078 - DNA, 390 bp, Gossypium hirsutum
  Clone ID: LIB3196-046-P1-M1-G10
gccttgacatatatatactacatgaattttgatctttttggttctatttgaattaagttgaatggtaaattagggttaagcttgattgatgaaaggtacgtgtgatattcacgcatgattttaagctgaaatgaaataatggtgttcataagaagctcatgtccgaatgtagccaatggctactaataatgtgaaatgttctataaaattcgttagaatacgataaaaaaaaacatgttatttgatgtggaattgtatccgggcttaaagacccgcagacttcgtgctggaatcgtatccgggcttaaagacccgcaggcttcgtgctggaattgtatccgggcttaaagacccgcaggcttcgtgctggaatgacatccgggttaaaaa

SEQ ID NO: 48079 - DNA, 385 bp, Gossypium hirsutum
  Clone ID: LIB3196-046-P1-M1-G11
taaaaaggcaatatggagcatggaataataatacatgaattaaatgctatgttaatgaatgtcaacaatatgaagatattaaataaaaatttctagagcatattatggcaatattcatgtaatacaccgtttaaataccaatattaacaaacgaagaaaatgaaacaaaataagttataaaaaaattcgaagtaaataatataaaacaatttaaaataaataatatgtaaaacaaattacaataaataatatacaaagcaatttcaaataaataatatataagatacttttaaacaacatatgaaatatgaaagagtttaagatatataataggtaaaaagaaatttaaaataaataatatacaaaggcattttaaaattaaaga

SEQ ID NO: 48080 - DNA, 379 bp, Gossypium hirsutum
  Clone ID: LIB3196-046-P1-M1-G12
gagaaataagaaaggtcaaagcccaactaaatggaggatttgatatgaaagatttaggaccagcaaagaagatacttggtatggagattctcagagatagaaaagcaagtaaattgtaccttcagaaggggtacattgagaaaattctttgcaggttcaatatgcagagtgctaagcctgttagtactcctttagcagcctatttcagactttcattggctttgtctccacaatcagatgatgagattgagtacatgtcacatgttccatactttagtgcagtgggatctctcatgtatgctatggtttgctcacattcagatttatcatattgcagtcagtacaattagcaaatacatggcaaatcccggaaaagaac

SEQ ID NO: 48081 - DNA, 326 bp, Gossypium hirsutum
  Clone ID: LIB3196-046-P1-M1-G2
ctttcattagcatcaaaatcactcgaggtttctttatcactgaaaaatgtcttgctgtggtggaaactgtggctgcggtactggctgcaagtgtggcagtggctgtggaggatgcaagatgtatccagacctgaacgctgccgagatgaccacaactgagactctggttcttggtgtagcaccccagaaagcacactttgagggagctgagatggaattcggggctgagaacggctgcaagtgtggagacaactgcaccttgcaacccttgcaattggaaaatgattagagaccaaagccaaagcttcctggaagcagaggcgcct

SEQ ID NO: 48082 - DNA, 391 bp, Gossypium hirsutum
  Clone ID: LIB3196-046-P1-M1-G3
atcgcggccccttccagttgccggcgaccctgcgccggcattcagagcgcctcgcctggcgctaaatttaaaaacgtaacagcagcagcaggctggtcccggaaacgaaacgaaactcggcccccgggcctcctcccgggcgctgccggtccctcagcgcgccgcgccacccggaacagacccttctcccgccattttcggcggggctgggagactgaggcccgcagcgctgggcctgcggcgccccggaagaggcgggcggcatggccgccggcgtggactgcggggacggggttggcgcccggcagcacgtgttcctggttccagaatatttaaaagatgctttaaagaagatgaaaagggggctaatggttgtaaaaccggttaaccc

SEQ ID NO: 48083 - DNA, 394 bp, Gossypium hirsutum
  Clone ID: LIB3196-046-P1-M1-G4
ttacggtgctcctatgcttttctatgggggacaatgggagggtattcatggggcggacttcccaggttgtcccgagacatatcaatcacagtcgcaacaaaatatacaagataggccacaaagagatcagcaccaaaagctcagacggttgaaggagggcgatgtggttgccttgcctgctggagtagctcactggattttcaacaatgggcggtctcaacttgtgttggtcgcacttgttgatgttggcaatgatgccaaccagcttgatgagaactttaggaaaattttccttgctggtagtccacaaggaggtgtggtaagaggaggtcaaagcagagaccgaaaccaaaggcatagcagaacccaaagaggggtacgggaggaggaagag

SEQ ID NO: 48084 - DNA, 361 bp, Gossypium hirsutum
  Clone ID: LIB3196-046-P1-M1-G6
acgatagcaacggggattggggccaggacttttattatggtggccctggtaaaaaccccaattgtccttaagagcaagagggaaaagcacctttttctttttggcgttgtgttttctacccttgttcccgtgtatcattcaaaccgtagtgtactgactcctcttctatatctttttggtttttactattaggttgggttaggaacctctctagcgggaaaattagttttgactctggttgttttacttgaaaaagatcccatcccatgtaagtggtctggaattcggccaagtttctgaaaaagccaaagaggaactggcctttggtgctactctttgtaattctatttctttgtttact

SEQ ID NO: 48085 - DNA, 371 bp, Gossypium hirsutum
  Clone ID: LIB3196-046-P1-M1-G7
atgggccctcttgcttctctgatagctcccagcgtactctctgcagccatgattgccagacagcagtgtgtccgaggcgggtctcggggcttcagctgtggctcagccatcgtaggcagtggcaagagaggtgccttcagctcagtctccgtgtctggaggtgctggccgatgctcttctgggggctttggcagcaggagcctctacaacctcggggggaacaagagcatcttcatgagcgtggctgggtcacgacaaggcgcctgctttggaggtgctggaggcttcggcactggtggctttggcggtggatttggtggctccttcagcggaaagggtggccctggcttccctgtctgccctgctggggg

SEQ ID NO: 48086 - DNA, 308 bp, Gossypium hirsutum
  Clone ID: LIB3196-046-P1-M1-G8
atgaagaggtgagccctggaaaactttactacgggctgcttgaattgaccaacctttcatgtagctttacagtgaacgctcagaccctttttttcattatatttccaaagatgaggaaagcggggtgggggcatggaggtcaaaactcaggccttacttagccagctaacaggacactattaacacaaagggagatagaaactgattcactttctggaataagtatttcaaacacattaaagtaaagatacaacaaactccgcgtaaccatttagtaaaccaatattttaaacaagaatcatttttac

SEQ ID NO: 48087 - DNA, 319 bp, Gossypium hirsutum
  Clone ID: LIB3196-046-P1-M1-H1
ccgagttggattgatgccaagccggagactcagttgaggaggaataattcggatgatttttggtccgattcgggtagtgatcggtcagatgatcgtaaattaagtgatttctctttgaaaaaagacttggagtccgctgagaatgagggttgtttacaagggataagtaaaacggaagctagggctgacgaaatgggtacatataagcctgaaggtgccgaacttactgaattggataagataaaggaattagattttggtgggtttggcgatattcaagatcaggaaaagggatttgagcgaggtgtggactgaatct

SEQ ID NO: 48088 - DNA, 390 bp, Gossypium hirsutum
  Clone ID: LIB3196-046-P1-M1-H10
gtttcgggatcacaggaccgagtcgaaaaaataataaatggttatattctatgcttattatgtgtgtacatgcatatgtcgacgtttcattccctaattttgccaattgcatgagaaattattaaatagggatcaatatgagacatggtgaaatatgatagactaattttaaatggtttattagtgcatgtcaacacaagggtggacttgcatgtcaaattgcccaattttctttatagtggccggccaagatgggtgttgatgggaaaatatatatgtttaattagttattaaaataagaaatggcattatgtgagaaaaaaataatattagtgaaataaagtaaagaaaacaaagaggaaggaaggctcatctttcatctccttcatt

SEQ ID NO: 48089 - DNA, 289 bp, Gossypium hirsutum
  Clone ID: LIB3196-046-P1-M1-H2
ataccgagtgtacttggcagttccgcgcgtccgagcagtcgatcccggcacccctgcccgcgggtctgttcgtgttcagctcgcgtcctgcagacgtccgacgtgctccagttggagaccgaggttcccgggctctagctgagtgggcggcggcaccggtggagatgcctgggaagaaggcgcgcaagaacgcgcaaccgagcccaacgcgggctcaggcagagctcgaagtcgagtgtgctactcaactcaggagatttggagacaaactgaacttccggcagaaact

SEQ ID NO: 48090 - DNA, 329 bp, Gossypium hirsutum
  Clone ID: LIB3196-046-P1-M1-H3
atggacgtcggaggtggaggttgtggagttcgctgttcgagagtgggcacgaaaagctccttttagtcctgcgttccgaaaggagggcgtctgttgggcctttctctcagtcgtgagggaggcgtcgacggcctacggaagtcgtgagttgaggcttgcgggatcgtttccggagaaagcgcaggctaaggccgcagcggaagatgtccaactacgtgaacgacatgtggccgggctcgccgcaggagaaggattcgcccaccgcctcgcggtcgggcgggtccagccggctctcgtcgcggtctaggagccgttctttttccagaagc

SEQ ID NO: 48091 - DNA, 316 bp, Gossypium hirsutum
  Clone ID: LIB3196-046-P1-M1-H6
agaaagatgttcatgagtgggttttattgttttggccttgatggtggtttccgccgcgacggtggttacggcggctgacaagagtgggttagcgaatgagtgcagcaaagatttccagagcgtgatgacttgcttaagctttgctcaaggaaaagcagcgtcgccgtctaaggagtgctgtaattcagtggcggggattaaagagaataaacccaaatgtttgtgttatattttgcaacaaacacaaacctatggtgctcaaaatctcaaaagcttaggtggtcaagaaaataagctgtttcagttaccatcggct

SEQ ID NO: 48092 - DNA, 299 bp, Gossypium hirsutum
  Clone ID: LIB3196-046-P1-M1-H8
atggcccgctgagatcaaagactacagtccctactttaagaccattgaggacctgaggaacaagattctcacggccacagtggacaatgccaacgtccttctgtagattgacaatgcccgtctggccgcggatgactttcgcaccaagtatgagacagagctgaacctgcgcatgagtgtggaggccggcatcaatggcctgcgcagggtgctggatgaactgaccctggccagagctgacctggagatgcaaattgagagcctgaaggaggagcttgcctacctgaaaaagaaccact

SEQ ID NO: 48093 - DNA, 192 bp, Gossypium hirsutum
  Clone ID: LIB3196-046-P1-M1-H9
aaattatggtgattggatagcgatactgactcatatgtctaataatagtctgacatatagcttttcaagtgatgatgggcacaaaaagaggaagagatcttctaaacgaggaaattatagacattgaaaaaggagaaaaagacgccacgataaaaagagaaaaaggcgttgataagagatctaagcgtaaat

SEQ ID NO: 48094 - DNA, 368 bp, Gossypium hirsutum
  Clone ID: LIB3196-047-P1-M1-A10
attcagcaacaaaagccaaggtcaaacgaaggcaaaaataaggttttccatggaaggggaagctggttcatacgaggacgttaagccaaacgtcgtcgctaaacaaagtaatggcgatgttgtcggggataatggtgttggaaatctgggatccgttgaagcccctgattttctttccaagaaaaatttccagaactgttccgtggcaactcctgcatctggactgaattccactggccctgctccatctcaactaaccatcttctatgatggacacgtttgtgtgtttgatgcaattcctgtggaaaaagtgcgggagattatgcttattgctgcaactggtgctgctaactcttgtgacatgaaaa

SEQ ID NO: 48095 - DNA, 340 bp, Gossypium hirsutum
  Clone ID: LIB3196-047-P1-M1-A11
attgcccagcagtggaaccagtactatcagaaccagggccagtggccgccatactacgggaactacgactatgggagctactccgggaacacacagggtggcacaagcacacagtagccagtgtgacccagaggctcccagaggcccctgccggcttccttcaccagcgccttgctcttgcccttctcttgccccgccagatcctgtggtgctggggatggggtcatcccagggctgcctccctccagcccactgcctcccctccgaggggcttccttcgcctccatagggccaggcatttttctctggattcaaacaagcaacaatgaccctttaattt

SEQ ID NO: 48096 - DNA, 374 bp, Gossypium hirsutum
  Clone ID: LIB3196-047-P1-M1-A12
gaagtattaattcacctataccaacatcaataatggttctagcagttgctaaaaaggactgacctagaatcagaggtacatcactatcctcatctatgtctaaaacaataaaatcaactgggaatatgaacttatcaattttcacaagtacgtcctcaataatacccctaggaaatctaatggttctatctgctaattgaatacttatcctagtttgtttgggttttccgagaactagttgcttaaacatcttatagagcatggcattaatactaacccctaaatcaagcaaagcattattaacatttaaacttctaattaaaaaaggaatagtaaaactccctagatctttcaatttgtggggtagcttattc

SEQ ID NO: 48097 - DNA, 172 bp, Gossypium hirsutum
  Clone ID: LIB3196-047-P1-M1-A2
tcggttcaattaatcaatcacacctggaatcgctaatagcccgtgagtggattagttactcatggaatccctaaacataataaactcgcacatagtgctatgcatgaaaaataaatgaagaataagttgtagagaatcgtgattgctttcgacagataaatgcgcaaaaact

SEQ ID NO: 48098 - DNA, 222 bp, Gossypium hirsutum
  Clone ID: LIB3196-047-P1-M1-A3
gcggaacaattcatcaatgacacctgctatcgctaatcccccataagtggattagttactcacgggatccctaaacataataaacttgattatagacatagtgcatgaaaaataaatcaagaattaagtttagagaatctcgattgtattcgattgacgaatcgcacaaatccttcaatgttggactgcgtctacatatcaagtgtttctagaacacgtatg

SEQ ID NO: 48099 - DNA, 376 bp, Gossypium hirsutum
  Clone ID: LIB3196-047-P1-M1-A4
atctcgcccgacccgccggtcaccagctacgccccgtccgatgtgccctcggggatcgcgctgctcctcaccatccctttcgccttcttcctgccggagctgatatttgggttcctggtctggaccctggtagccgccacccacgtagtattcccattgctgcaaggatgggtgatgtatgtctcaatcacctcgtttctcatctccttgatgttcctgttgtcttacttgtttggattttacaaaatatttgaatcctggagagttctggacagcctgtaccacgggaccactggcatcctgtacatgagtgctgccgtcctacaagcacatgccacgattgtttctgagatcatggacccgagaatttactaca

SEQ ID NO: 48100 - DNA, 256 bp, Gossypium hirsutum
  unsure (1)..(256): unsure at all n locations; Clone ID: LIB3196-047-P1-M1-A5
cccacgcgtncggtgaaaatttcaagcttcgatttagtcgattgcatgtgaatttagtcaataggacttatatgagaaaattttaaaatgtgataggcaaatgtccaagtgattaaaatgttaaactattaaagttgtgggtttgcatgtcaaagtacacaaaatttgattagtggccaaccatgctatgggttaaatgtttaataacatttatgtagtgtttatgtagaattataaataagacatggtaagaata

SEQ ID NO: 48101 - DNA, 250 bp, Gossypium hirsutum
  Clone ID: LIB3196-047-P1-M1-A8
tcggaacaattaatcaataacacctggaatcgctaatagccgatgagtggattagttactcatggaatccctaaacataataaactcgctcatagagatatgcatgaaaaataaatgaagaatcagtggtagagaatcgtgattgtattcgacagatgaatgcgcaaaactcattcaacggttgactagccctacatatcaagtgctccgagaacacgaatgaaaagaatcgcaacgaaatatagaccct

SEQ ID NO: 48102 - DNA, 403 bp, Gossypium hirsutum
  unsure (1)..(403): unsure at all n locations; Clone ID: LIB3196-047-P1-M1-A9
ctatttaggcngacaactatagtaacaaggtttgtacacaaaaagcacggctggtacccggtccgcgaattctccgggatacccacggtgaggggcacggacctcgaaggtgtgttgcctgttcaacaatcacgtcatcatgggtgtgttttgtcaactcgcttgttaattgatttggggatatttgccccaaatgagaggttgaggaaaagactgtgggtggggaggccctgcctgacccatccctttttctttctggccccagcctaggtggaggcaagtggaatatcttatattgtgcgatgtgcgggcttggggaggcagagaatctctttggagtcttgggtggcgctggtgcattctgtttcctcttgatctcaaagcacaatgtggatttggggac

SEQ ID NO: 48103 - DNA, 453 bp, Gossypium hirsutum
  Clone ID: LIB3196-047-P1-M1-B10
ctaatacgtgtcactatagaacaagctggtacacatgagcgtgctggtaccggttctgagtttccgccataccggagcgtgtgtatgcagcctgtgcatttggaccatgcttgatctgatcgcagcagacacacgattggacttggtcctgttgctggcctttagtgagcacaatacggctggaaatatattcatctatgcctttagcatttcatctgcgatggccatggtctttctggggaccagagggaacacggcagcacagctgtccaagacttttcatttcaacacggttgaagagattcattcaagattccagagtctgaacgctgagatcaacaaacctggagcgtcttatattctgaaacttgctaatagaatatatggagagaaaacttacaatttcctccctgagttcttggcttcgactcaaaaaacatatggtgctgacct

SEQ ID NO: 48104 - DNA, 348 bp, Gossypium hirsutum
  unsure (1)..(348): unsure at all n locations; Clone ID: LIB3196-047-P1-M1-B11
cggacgcgtgggcggacgcgtggtcggacgcgttggatctgcagctagatccagagaacgcgnactggcttgcacggttgaattggaatctgtcgcgacacaattaagaaaaaaaaaagccgctgtgataagaggatgagctgaacatgacaaggcgtaagctaatgatgtggaacatgatcccggttgtggtgtagcgaanaccacaccacctcgtgttcttgggcgagtctattctatgcaaaggtaaatataggagctcatctttttttttctttaatgtagatgacaaagaaaaacaaaatgctttgattaaagggagggggagaaccaattaaaaggagtggg

SEQ ID NO: 48105 - DNA, 389 bp, Gossypium hirsutum
  Clone ID: LIB3196-047-P1-M1-B12
attgcagttccattgggatcgcttccgcacttttgctcgactagacaaaaaaacagatgaaagccttaccaagtacttccatggctttgtggccatgtgccgccaagtatgccgccttcccccagcagctggagatgaacccccagaccctaatctgttcattgagcccatcactgaggagagggcctcacggactctttaccgtatagaattgcttcggcgcttacgggaacaagttttatgccacccccttttggaagatcgactggcattgtgtcagcctcctggtcctgaattgcccaaatggtgggagcctgttcggcatgatggggagcttctacgaggggcagcccgccatggggtgagccaaacagactgcaacatcatgc

SEQ ID NO: 48106 - DNA, 240 bp, Gossypium hirsutum
  unsure (1)..(240): unsure at all n locations; Clone ID: LIB3196-047-P1-M1-B3
atttttaaccttaagcctccgcctgcagagctcctccgccagttatggaggtggttttgggggtagctcttgccacttgggaggaggcccgggggccttaacctgttcaactcggtttgtttttggggaacaagttgaggcttccgaaggggggtgaaccgttggttttgtggaagggcctgttncggcttttgaagtggcttccggggagggccttgaagggggttttgtggggggttt

SEQ ID NO: 48107 - DNA, 266 bp, Gossypium hirsutum
  Clone ID: LIB3196-047-P1-M1-B4
catgaatccagccagggcatttggtccagccttggtaggatggaggtggaaccaccactggatctactgggtaggtccactgataggtggaggtttagcggctctgatatacgagtacatggtgatcccagcagctgagccaggacacccaacgcaccagcccttggctgcagaagattactagtacagtgtttcttgtgttttgtacctgtacctgtacctgtacctagctacataatttgagtctttacggatccatcatgctt

SEQ ID NO: 48108 - DNA, 351 bp, Gossypium hirsutum
  unsure (1)..(351): unsure at all n locations; Clone ID: LIB3196-047-P1-M1-B6
acgcggacgcgtacgcgtaggcgggcgcgtaggcggacgcatctgatctcgatctagatacacgagaacgcagacggcttgcacggttggaatgtaatgtgtcgcagacacaatgaagaaaaaaaaaagcccctgtgatgagaggatgagctgaactaggcaaggcgtaagctaatgatgtggaagatgatcccggttgtggtgtagcgaanaccacaccacctcttgttcttgggcgagtctattctatggaaaggtaaatataggagcttatctttttttttctttaatgtagatggacaggagaaacaaaatgctttgattaaagggaggggtagaaccaattaaaag

SEQ ID NO: 48109 - DNA, 366 bp, Gossypium hirsutum
  Clone ID: LIB3196-047-P1-M1-B7
gcacttcaaagggttgcttcaaaggctcctattcttaggggcctcaaagaggtccccttatctatcttagaagcaaacccccacactttagttctcccacaccattgtgacgctgagaaaatttaccttgtcgcccacggaagaggaacgcttaccctcttgacacatgaaaacaaaaaggcctacaatatagtaccgggagttgtagtcaaagtcccagcaggaagcactgtgtacttggctaaccaagacaacaaggagaagctaattatagcagtgcttcaccgccctgttaataaccctggacaattcgagggattatttccagctggaagccaacgccctcagtcatatatacgagccttt

SEQ ID NO: 48110 - DNA, 314 bp, Gossypium hirsutum
  Clone ID: LIB3196-047-P1-M1-B8
agccttccgaaaaacccagccttagcagagcggctgaacctaccataatattaatccatgccggcaccgatctggctatgggctttctctgtagccctaactctggttccgtctgtttttggaaactctgaaggagatgctcttaacacgttgagaaaaagtttgaccgatccagataacatactccagagctgggatccgaaccttgttaatccttgtacttggtttcacatcacttgtaaccaaaataatcgagtcactcgagtagatttaggtaattctaacctgtctggacatttggtacctgagcttgg

SEQ ID NO: 48111 - DNA, 95 bp, Gossypium hirsutum
  Clone ID: LIB3196-047-P1-M1-B9
ttgtacgctaaagcacgctggtaccccgccccaatttcccgggtggggcccattggttcttttaatgcttccaaattaattcctggaaccattaa

SEQ ID NO: 48112 - DNA, 252 bp, Gossypium hirsutum
  Clone ID: LIB3196-047-P1-M1-C1
actattttgcaagtttgtaccaaaaagcaggcttgttccggttccgaatttccgggattgccagagagagagccacagaccagggaacaggacagagcccaccaaaccagtgagactgtgactgggtctggaactcagacccaggcaggtgccacccagactgtggagcaggacagcagccaccagacaggaagaaccagcagccagacacaggaggccaccaatgaccagaacagagggattgagatccat

SEQ ID NO: 48113 - DNA, 360 bp, Gossypium hirsutum
  Clone ID: LIB3196-047-P1-M1-C10
atccgggaccgtagaggctgcagagagctagaacccgagtcgcagctccgagtcgcagctccgggccgcagagcgctgggcgaacgcgagggccagggcaacggcagggcgggcagctgcgctctcggctggagtcatgctatactgaaaagacactccatcaagagaactctgggagaagcaggaaaccctgtgccagggacaggaaagataggagaaagaaagtgtatcagaaatttttaaacctgtctcagaaataacaacatattttaatcagagatttatgttgctatgaggacagattcatcaaaaatgactgatgtggagtctggggtcggcaattttgcatcttcagcaagg

SEQ ID NO: 48114 - DNA, 235 bp, Gossypium hirsutum
  Clone ID: LIB3196-047-P1-M1-C2
cttgtttcttttaaactctaaatataaaggaggccaaacatgccgcctcgtagataccaatttgggagggctgatgaggccactcatcccgactccatgagagccaccttggctgaattcctctccactatcattttcgtctttgccggcgaaggctcaattcttgctcttgacaagatgtacaaggatacgagtgcgacgcctgcaagactggtgatgatagcacttgcgcatg

SEQ ID NO: 48115 - DNA, 401 bp, Gossypium hirsutum
  unsure (1)..(401): unsure at all n locations; Clone ID: LIB3196-047-P1-M1-C3
attgattttcaagctctggttgctgatgagtatttcccctatgctctaagcagatatttcactttttcttttcgtgtagtttctgttaatatctctgttgtaatttcaggagtcagaacagtgtggaaactttaatgtaggaaatccacaaacgtattgtttttacatagaaagaaaatgttccttgttgctctagatgttggtgctgtatccctaatacttatggaccaagcaagaagaaattgtataatctttgttgttcagaaagnttctaatagaataaatagtagaccttgtagaatgaactggcactaataaatggtacttttaaagacatgaatatgggagtattaaattattcaaccagatatatttataactctaggcttttaattttttta

SEQ ID NO: 48116 - DNA, 268 bp, Gossypium hirsutum
  Clone ID: LIB3196-047-P1-M1-C4
gttcaatgccatgtcgatgcgacattacttttactaacgaaattttcttatttcacgactctttaacctctcgagctaaaatttggatcgacttttcttcaatatttatatcagactaaattttgatctcagatagaggaatcacatgcgaaggatcagatctgtaacgtcgaaacatccatacgtgaaacacattatgaatcttttctaattctggtggcaacaacaatctatatgctatcggcccaatacgttatataatttcata

SEQ ID NO: 48117 - DNA, 204 bp, Gossypium hirsutum
  Clone ID: LIB3196-047-P1-M1-C5
cttagaagctttgggaaagaaatcggaagatgttgatgcaaacctcagcaatattttcatcaaagcctgcgtgggtgaaagcagtacaccgcacatcctccaccgattccaattccatggctgctaccgtccccgcccccaagtgggctcagaagaccgtaactcttcctccccttcggcggggctgccatctcgttacgtctc

SEQ ID NO: 48118 - DNA, 355 bp, Gossypium hirsutum
  Clone ID: LIB3196-047-P1-M1-C7
atgtgcccgaggcagcggcccattgcgatcaaaggctacaggccatacttgaagaccatcgaggacctggggaacaagatcattgcagccaccattgagaatgcgcaccccattttgcagattgacaatgccaggctgtgagtcgatgacttcatgacaaagtactagcacgaactggccctgcggcataccgtggaggccgatgtcaatggactgcgccggctggtggatgagctgaccctggccaggactgacctggagatgcagatctaaggcctgaaggaggagctggcctacctgaggaagaaccacttggaagtactgcttgcactttgagggcctagctctggagaag

SEQ ID NO: 48119 - DNA, 395 bp, Gossypium hirsutum
  Clone ID: LIB3196-047-P1-M1-C9
aatggtgtggtctcgacatgtataatcaagcaagttctataataacagttcaatattgacgcactcaaagcaataataaaagtgagtatgaaaggattaatagatgctcaaaaggctcaaaaatctcacaaaaattatggctttttgatgtttaggctcatgaattccaattcaaagtaatacctagacttggggaaacaatctataattttcaattcttaaaaatcaacttatcatgcttgattctctaatgtcttaaagtttaaacaatcaatgcataaatccttatgttttaattcaagatatatcaatcaaaatcataaatcaattaaaatttatcctaaatatgatatgagagctttttcaagagaacaaggcaatcattcaaggatttt

SEQ ID NO: 48120 - DNA, 364 bp, Gossypium hirsutum
  unsure (1)..(364): unsure at all n locations; Clone ID: LIB3196-047-P1-M1-D1
cagatcccaatatctggattcggaataaatatatatataaataaaataaaacatggccttaacaggcatgcaactctagtttctactctacaacttgcatgtatttatatatgtgcgggagcaatgttttgtaatccagctaaattaaataaaagtaatagtaaacaaggtttttcttctttaaaaaaaaaaaaaaatnnttaanaaaaaaaaaaaaaaaaaaaaaaaaaaaaaaaaaaataaaaaagttataaaataaaaaaaaataaaaaaaaaaaataaaaaattaaaaaanttttntggggccgccccttttagaggacccaagttaaaattatcctaaataagatataaaagctttttt

SEQ ID NO: 48121 - DNA, 404 bp, Gossypium hirsutum
  Clone ID: LIB3196-047-P1-M1-D2
atctccagcctgtcacgctctccacagccctctgatcgcctggaaccatggccagcacatccaccaccatcaggagccacagcagcagccgcaggggcttcagtgccggctcagccaggctccctggggtcagccgctctggcttcagcagcgtctccgtgtcccgctccaggggcagtggtggcctgggtggcgcatgtggaggagctggctttggcagccgcagcctgtatggcctggggggctccaagaggatctccattggagggggcagctgtgccatccgtggcggctatggcagcagagccggaggcagctatggctttggtggcgccgggagtggatttggcttcggtggtggagccggcattggctttggtctgagcggtggagccggccttgct

SEQ ID NO: 48122 - DNA, 235 bp, Gossypium hirsutum
  Clone ID: LIB3196-047-P1-M1-D3
gttcttttgtatgtatgtaatgatgatcgtgctaatgcccgatgtgtaagtattctatgagggatggtcattatattgggtcaggcattaccattctaaactttttaaggactccgagatcaatccacctatggttttactggatcctgttcgagaacgtgatgtcgttgcaccggacaaaggcaacgtttatctggctcctagaggcagggagagccaatgaatgggtcgtgac

SEQ ID NO: 48123 - DNA, 269 bp, Gossypium hirsutum
  Clone ID: LIB3196-047-P1-M1-D4
attgctatcctagtttaagggggataaaataggaatcaagaagcctggcccacttgagcgcccagcccaagtgcattctgcaatccagtttatattagtcctccatgtgggtggctatactttatcaagattcccccccaaggggaggaggattattagtcacgttatcaaactcccctccaacccctttctctgcttagaggtatgtgtaacgtgtagtagaaagatcgaatccccacgcaaaagtccgtgctgctactcaatttttt

SEQ ID NO: 48124 - DNA, 400 bp, Gossypium hirsutum
  Clone ID: LIB3196-047-P1-M1-D5
atacctggacaaggtgcgtgctctggaggaggccaacgccgacctggaggtgaagatccgcgactggtaccagaggcagcggcccagtgagatcaaagactacagtccctacttcaagaccatcgaggacctgaggaacaagatcattgcagccaccattgagaatgcgcagcccattttgcagattgacaatgccaggctggcagccgatgacttcaggacaaagtacgagcacgaactggccctgcggcagaccgtggaggccgatgtcaatggcctgcgccgggtgttggatgagctgaccctggccaggactgacctggagatgcagatcgaaggcctgaaggaggagctggcctacctgaggaagaaccatgaggaggagatgcttgctcttcga

SEQ ID NO: 48125 - DNA, 384 bp, Gossypium hirsutum
  Clone ID: LIB3196-047-P1-M1-D6
gcttagttaatggttccatcataaagctagcaattagatcatattttaaaagtcgcagatcgatatgatcaaaaaaaaaaggaataacggtcgaaattacataatctgttaagggatgggcaggggcagagccagaaaaattatttggggggggcggatgaaattttaattctctatagtttatatctttataaattcgcaaggattaaatcaaatttttataattttaggggggccaaagtacaattttacctttactaatttaaaatttataaaaaatttaaagggccaaaaatataattttacattttagggggacggggctcatgccaaccaccctagctacgcccctaaatatgggctaaatttatatttatgtctaac

SEQ ID NO: 48126 - DNA, 378 bp, Gossypium hirsutum
  unsure (1)..(378): unsure at all n locations; Clone ID: LIB3196-047-P1-M1-D8
agaaaaatggctgatttgagagacgaacacggcaaccctattcaactcaccgacgaacacggcaacccggttcaactcactgacgaacacggtaaccccatttatgtcaccggtattgccaccaagcatcccacgacgacaacgtcactgtcgggtttaatgggatatggcaccggttccgccgtcgccactgatcagtcacaacagcagctgcagccaccgcctccgcagcaaacacagccgctgcattacgaggtttccggcaaggaaaagattcaacgctccagcagcttcaactccagcttcagctttagcttcgtngaagattaatggattggccgtagaaggaagaaagggctgaaagagaaagtaaaggag

SEQ ID NO: 48127 - DNA, 186 bp, Gossypium hirsutum
  Clone ID: LIB3196-047-P1-M1-D9
actgcgttgttcttccgctcacgattttgatccccgaagtttgggttcctatttggggagctgattatattgcgtcaggcattaccattctaaacttttgtaggactccgagatcaatccacctattgttttactggatcctgttcgagaacgtgatgccgattcaccgcacaacagcgacgtgaa

SEQ ID NO: 48128 - DNA, 136 bp, Gossypium hirsutum
  Clone ID: LIB3196-047-P1-M1-E10
attcgggctcatcccacgcagaaagggcaagaggggctggacggggcgcaaggtggccaacgtaaggtccaacacgtggggtggtaccccaagcccgggtcagacagggacaaagcaagggacacaaaacaaaagg

SEQ ID NO: 48129 - DNA, 380 bp, Gossypium hirsutum
  Clone ID: LIB3196-047-P1-M1-E2
cttaagccaagcgtgcgctatctccatgtctctgtctcccccccatttcagatctcaaaggcctagacgctgtttcctgtttcaaagcgtgagatggcgacaacatcagcagctacattctcgatcggatcaactgtctcctttggaagaagggggagtccacttctgctaacaaaaccttctgctgcagggtgctcctcacagaattcacttgcaagtttcagtggccttaaggcagcaacatacgtgaactgtgattctgaatcctccttccttggcaaggaaagcagtgcaactcttagggtctctttcacgcggaaagcacagaagccaaaccagagttctaaccatggcttacagcttcaagcatcttacaaagt

SEQ ID NO: 48130 - DNA, 183 bp, Gossypium hirsutum
  Clone ID: LIB3196-047-P1-M1-E3
atgaaaggtccctttctgggtttataatgatgccagattctagttcagctgatggggacaaaaaccatcatgactcaaaccggtggaaatggaagatcttcaacagtgagtttgcttttaccattggagagatgacaacacttaatttgccaagaggcttagcccatgggaatatgcaaactt

SEQ ID NO: 48131 - DNA, 266 bp, Gossypium hirsutum
  unsure (1)..(266): unsure at all n locations; Clone ID: LIB3196-047-P1-M1-E6
cctaaaacgactcactagaagagaaagctcgcactcctgcacgcgccgctccattatccccgggtccttccactcctgcgctagcatttctcgatgatagagatagagcctagctctcacattaacaagaaatagtgctacaaagggggggaaatcccagtggccagtatggaatgcatagagaagagaggggcatggtcgtcgacgcctgagctttctggccacggtatactgtctatctgcggccngaattgttaccggaaaca

SEQ ID NO: 48132 - DNA, 215 bp, Gossypium hirsutum
  Clone ID: LIB3196-047-P1-M1-E7
atcataaataaaacagccagcatgttacttggcgaaattgtagtgattgaacgaatatttgtttactcttcaagcatgtgttgagcaactgtgtatcaagcaagaagaaagccattgtctttacccttctggaatatagaggctcataggaaataatcaatactttgatttttttttaaagcataattagatgaaaattaataagactcatagac

SEQ ID NO: 48133 - DNA, 362 bp, Gossypium hirsutum
  Clone ID: LIB3196-047-P1-M1-E9
atcatgactgtggcttccccccagcagggatgggattccacagctggttgacggtgttggggagagggagaaatagaggccgtcactcaggtgtctgagttcaaaacgtgtgctctcatttcaagggccagcaaccctccctgatgggtcgtcagcaacaaaggcgccttaagacgtgacgcaggccctgggcccagcttgaaagagacagggattgtccttaagagcacgccctgggctgagggccgcgctgggacttcccagctgtgccgcccctacaagcaggagcccagcagccccccgctggcgcctggcctgcccgccttcctggcggccccgggcaccacgttctgccccgagtg

SEQ ID NO: 48134 - DNA, 402 bp, Gossypium hirsutum
  Clone ID: LIB3196-047-P1-M1-F1
atatcttcgcggaggtgaatgccgaccgcatcacctggctgtatgatggcaccaccggcagacagacgaagaattccgtggatactcgcaccattggcaggtacatcagcaccaaggcagtgggaagtaacgctcgcatggacgtcacggacaagtacaagtacccagaaggctctgaccaggaaagacgagtgttccaaaaggctttggggaaacttaaacccaatgcgtcatttggcgcaacgtcttcaatgggtttggaagcagaggaacgggagtccagcatcatcgggaagttcaaggtcactggcatgctagcagtgggcaaagaagtcaacctggtcctactgctcaaaaacctaagcagcgatacgaagacagtgacagtgaacatgacaggct

SEQ ID NO: 48135 - DNA, 340 bp, Gossypium hirsutum
  Clone ID: LIB3196-047-P1-M1-F12
ccagtttcagaatcaactgctaaaaaacaagctatggagagtggtgagcctagcaagaaatcttcttttcagcttcagaatcaacctcctccacgtcctttctctataaaaagtatcatctttgtggcttccattgccgccggtatccaattcgggtgggccttgcagttatccctccttacgccatacgttcaactcctcggtatccctcacaaatgggcttctcttatttggctctgtggacccatctctgggatgctagttcaacccatcgttggttaccacagtgaccgttgcacctcccgtttcggccgtcgccgcccttttatagctgcgggag

SEQ ID NO: 48136 - DNA, 159 bp, Gossypium hirsutum
  Clone ID: LIB3196-047-P1-M1-F3
cggacgcgtggggttttgaagctggaaaaattcagcaacatatttccttgcttgaagtgatttaatgtctttgcttgatgatttttgaatttttggacccctaaagcataagctttcataagaggggatcatttgcaaatgatgagaggttaggtttta

SEQ ID NO: 48137 - DNA, 408 bp, Gossypium hirsutum
  Clone ID: LIB3196-047-P1-M1-F5
attgtatgtggaggtgcggtacagtccgcacctgcttgccaattccaaagtggagccaatcccctggaaccaggctgaaggggacctcaccccagacgaggtggtggccctagtggcccagggcctgcaggagggggagcgagacttcggggtcaaggcccggtccatcctgtgctgcatgcgccaccagcccaactggtccctcgaggtggtggagctgtgtaagaagtaccagcagcagaccgtggtagccattgacctggctggagatgagaccatcccaggaagcagcctctttcctggacatgtcgaggcctaccaggaggctgtgaagagcggcattcaccgtactgtccacgctggggaggtgggctcggccgaagtagtaaaagaggctgtggatatact

SEQ ID NO: 48138 - DNA, 383 bp, Gossypium hirsutum
  Clone ID: LIB3196-047-P1-M1-F6
ctcttgcactcacttttcttcccttgtttaaacctaatattagattcaaatatcattagcaagattgaaatccatatattttgtttacccagtttgtaaaatcaatctttgaaacccatatcccattttttattgaaagggagttgaattggagtcggagatggagaacaaccagcaatccttttggcaattcagtgatcaacttatggtccaaaattccaacttggcgaacctttcgctcaacgattcgatatggagcagtggttacgtttcgaagaggcctgacgagaggaggaattttgatatcagagtaggcggcgaactgaactccgtcaacagcttgaagccgaaggtcaccgatttcaactctttcagcaacgatg

SEQ ID NO: 48139 - DNA, 363 bp, Gossypium hirsutum
  unsure (1)..(363): unsure at all n locations; Clone ID: LIB3196-047-P1-M1-F7
tcgtccacgcgtccgcgagaaagaggaaatttcggttggtataaaaatgcaggtgtttgatagaatgactattccaattcgcagagtttggaccggtgtcgccacccgcttcggcgttcgtaaaagtgctcatatgaagctttcgaaagatataagcacttgcgaatacgaggatgtgcgagtgatgtgggaaatgctgagcatgaacgaagcagaaaccattcgatccccaacaacaagtaaaggaagatgcaganagagaccaatgtggaattgctttgaatggcaaagcgagctcttttctttgcgagctctgaatactgcagagaggtgtttgtgcactacggtttagttatatctatt

SEQ ID NO: 48140 - DNA, 428 bp, Gossypium hirsutum
  Clone ID: LIB3196-047-P1-M1-F9
cgacactataatacgagtcagtacagggaaagctgctgctcccgcgtccgcacagttccggggatcacgatattgagcgtgggtggatcttggtcaccaaggaacagcaccggcaactcaaatctctgcaagagaaggtctccaagaaggagttcctgagactggcccagacactgcggcactatggctacctgcgctttgatgcctgtgtggctgacttcccggaaaaggactgtcccgtggtggtgagcgcgggcaacagtgagctcagcctgcagctccgcctgcctggccagcaactccgagaaggctccttccgggtcacccgcatgcgatgctggcgggtcaccttctcttgtgccattgcccaatggaagcacgagcagcccgggccggggcccgggcgaagtgcgcctggaactggcttt

SEQ ID NO: 48141 - DNA, 376 bp, Gossypium hirsutum
  Clone ID: LIB3196-047-P1-M1-G1
cccacgcgtccgtgcacatgcaacttctactcttgctggtgacctagctgagatcaatgctattaaaaaggtattcaagaatacatcagacatcaaaatcaatgcaacaaagtccatgatagggcattgtctgggcgcatcgggtggtttagaagccattgccacagtgaaggccatcacaacaggatggctgcatccctccataaatcaatttaatccagagccttcagttgagtttgacactgtggccaaccagaagaaacagcacgaagttaatgttgcaatttcgaattcattcggatttggtggacacaactcaatggttgccttttcggccttcaagccttgaaagtctttggcatttaattttgcattg

SEQ ID NO: 48142 - DNA, 386 bp, Gossypium hirsutum
  Clone ID: LIB3196-047-P1-M1-G10
cggacgcgtggggtttgactcagatggaagggcttaacatgtatggcaatggggttgataatgggttggtgttaaggaagagagtgatggttgtagtggatgagagctcgcattctaagcatgcaatgatttgggcactcactcatgtggctaacaagggtgatttgcttactttacttcatgttattcccccaacccaaaagacttcttattcttcttcttctttttctccttaccttgctaactctcttgggtcactttgcaaggcttgtaaacctgaggttgaagtggaagcactggtaatccaggggccaaagctggggacagtgatgagccaagtgaagaaacttgaggtttcagtgttggtactgggtcaaaaaaagcat

SEQ ID NO: 48143 - DNA, 171 bp, Gossypium hirsutum
  Clone ID: LIB3196-047-P1-M1-G11
atgggccttcgcgggtggctgctccagcttccccagccctgcccgcgtcctggtgggaaactcagcccagaaggagtcttcgggggctcctcgcgggttggggaaccgtcggacgctggcgcagggggcggttcaaggaccccgtggggtgttcactgacccttcgtgctc

SEQ ID NO: 48144 - DNA, 410 bp, Gossypium hirsutum
  Clone ID: LIB3196-047-P1-M1-G12
atcaccaaagaaggaagctcgtcagcgccaggattccaaaatcccgcctctcaaggcttcctgagatattttgtctcccggcatgcactgcgtccggcccgggtgtcctctgcccggaagacggaagtgcagagacttccggtcggcgtgatcctgaggcgtgtgtgttggtttttcaggtaaaacatggctaaaagcttacggagtaagtggaaaagaaagatgcctgctgaaaagagaaaaaagaatgccccaaaggagctcagcaggcttaaaagtattctcaaactagaaggtgatgttttaatgaaagatgttcaagagatagcaactgtggtggtacccaaacgcaaacattgccaagagaaaatgcaatgtgaggtaaaagatgaaaaagatgacatgaaaat

SEQ ID NO: 48145 - DNA, 255 bp, Gossypium hirsutum
  Clone ID: LIB3196-047-P1-M1-G3
acgctactcgatggtgtgacccagtttcagacctaggcgaagacatcgactatcttgctgcattgctacgcatgtgacccaataccgacaacccagtccgagcaccttcacaggcttcaccgcggtcacttgtaccccttccacgagtacctctagtgctcattatcgtattacgcttttatgcatcaggctaatagctctagtgtttggtaacagatattttatgaaaaacagtatctattattcagtggtttc

SEQ ID NO: 48146 - DNA, 383 bp, Gossypium hirsutum
  Clone ID: LIB3196-047-P1-M1-G4
atcaccctcaagttccaggcgagcccacccaaaccaccacttccctcgtcgagaccgccaccggcgccatccaaagcttccgccctatcaaacaaatccatcaacacctctgcgcatttcatttctatggctacgacatgacccgtcaagtgcaagcgcaccatttctgcgcacatcaaaacgaagaaatgcgacaatgtctcatatatgacacccccgaagccgatgcaaagctcatcggattggagtacatcatatcggagaatttgtttttgacgttgccggacgaagagaagccgctttggcattcacatttgtacgaagtgaagagtggggtgttgtttatgccgcgagttccggggccgatcgagaggcaagatctg

SEQ ID NO: 48147 - DNA, 386 bp, Gossypium hirsutum
  Clone ID: LIB3196-047-P1-M1-G5
atcagcggcctcggctccctgggtccggacgcagcggcccccggaggaccgggattgggcgcggagctgggcccggggctgtcgtgggctcccctcgtcttcggctacgtcactgaggatggggacacggcactgcacttggccgtgattcatcagcatgaacccttcctggattttcttctaggcttctcagctggtactgagtacatggacctgcagaatgacctaggccagacggccctgcacctggcagccatcctgggggaggcatccacggtggagaagctgtatggagcaggcgcccggctgtgcgtggcggagcgtatgggccacacggcgctgcacctggcctgccgtgtgggagcacacgcctgtgcccgtgccct

SEQ ID NO: 48148 - DNA, 365 bp, Gossypium hirsutum
  Clone ID: LIB3196-047-P1-M1-G6
atgctttgtctttggatttagcgtttcagaattgcaattccaaaatgtgtaagacaggagattctcttctgtgctgtcaagggacatggatttgattgatatactttggaggcaagatatcgatcttggagtaagtcgagaagtatttgacttcagtcagcgacggaaagagtatgagctggaaaaacagaaaaaacttgaaaaggaaagacaagaacaactccaaaaggagcaagagaaagcctttttcgctcagttacaactagatgaagagacaggtgaatttctcccaattcagccagcccagcacatccagtcagaaaccagtggatctgccaactactcccaggtttgccacattccca

SEQ ID NO: 48149 - DNA, 122 bp, Gossypium hirsutum
  Clone ID: LIB3196-047-P1-M1-G7
aagaaactcactcttgttcctataaaaccacttatccataaataaacacagcaactaacttcattacccaatccaagattttcagacatgccattatttaacaaaagctcaaaatttgactc

SEQ ID NO: 48150 - DNA, 406 bp, Gossypium hirsutum
  Clone ID: LIB3196-047-P1-M1-G8
atggcagcaatgctgagtaggtaggataattatttcattcagtttttggagctcagttaagccaatgcatttaaagttttgcatgaggaacattgactttattaagcattttcagatgtggtggttgtatttttgcaccaagaagtgtttggataaccacacaaaagcatgatgaaaaggcttcttgtagtcccatactttcttgtgaactaatgttgtgaatttttgtttgcagtcacctgcatagttcctacaggctaatgtggtaaaactgttgatttcccaatttaaccttaagtttctgttgcttataagtgattcatttgctacagctggaatatgggaaaattaatttgggcttagtggttacaaatatgtgtaagtggatgtatatgtacttaaactg

SEQ ID NO: 48151 - DNA, 327 bp, Gossypium hirsutum
  Clone ID: LIB3196-047-P1-M1-G9
atcctctcacctccagcctctcacgctctccacagccctctcatctcctggaaccatggccagcacatccaccaccatcaggagccacagcagcagccgcaggggcttcagtgccggctcagccaggctccctggggtcagccgctctggcttcagcagcgtctccgtgtcccgctccaggggcagtggtggcctgggtggcgcatgtggaggagctggctttggcagccgcagcctgtatggcctgtggggctccaagaggatctccattggagggggcagctgtgccatcggtggcggctatggcagcagagccggaggcagcta

SEQ ID NO: 48152 - DNA, 107 bp, Gossypium hirsutum
  Clone ID: LIB3196-047-P1-M1-H10
cataaaaaaaaaaaaaaaataaggaaaataaatttataaaaataaaacaacaaaaaaaaataaaacaaaactaaaaacaaaaaaaaaaaaaataaataagattacaa

SEQ ID NO: 48153 - DNA, 262 bp, Gossypium hirsutum
  Clone ID: LIB3196-047-P1-M1-H11
tcgcccacgcgtccgctaaacattaccaaaatatggggatgggtgtattaaaactcgctaataaaggtgacttgcttgagcatttttgactagggtaactgaccagccatgctgagtgcgttgcactgtgtacgtgggcttatacgaccaatgaacgctcggtattatcttgaaatgatcctagtctcccaagcaatctttaccatttgcaggaagctcttgatctatttaacgatggttcaagcactaatggaaggagaac

SEQ ID NO: 48154 - DNA, 382 bp, Gossypium hirsutum
  Clone ID: LIB3196-047-P1-M1-H12
cccacgcgtccggcaagaagttcgcttttctgatggttgcaatggctctgcttcttcaatccatggtgcctccgacagcattagctgctcgtaacaatgttatggaatacaatccattggcaagcgtattctcgagggaaggccctggctgcatcgcaaaaggcgggttttgcttgtttgacctaaccagttgctgtatgccatgcggatgccttgcaaggtggtgctataacattgatcataattgcaatgagtacacataatggtcgctactgagttaaaaaaaacagctctgagtcaaaaaatgacatgggattcgattataaatgttctatatataacatatgtttttgaataaagaatctcgtgttatgtccctgat

SEQ ID NO: 48155 - DNA, 132 bp, Gossypium hirsutum
  Clone ID: LIB3196-047-P1-M1-H2
gtgactcaaggggaggaggggtgcatatagaatatcaatccttcaaccttagcaccgtgggggaacaagttcaatatatgggttataatcattttaaacgctaaaataacctatacagtaacacttataatg

SEQ ID NO: 48156 - DNA, 271 bp, Gossypium hirsutum
  Clone ID: LIB3196-047-P1-M1-H3
gtttggctggatccatgtgtcctccaaagtctgagttatgttaataggcgaaatatatgtggggaaaaatcaaatgaaattgaggttagtagtgatatttgaattgaatgagaattggatttgattgatgaatgtatacatgtgtgaaattgaattgtataatgatttgcggggaatttgaaaatgtgaatgaattggtattgcgattgatttgggttcgattcaagcacgtttgcatgtatatgtgaaaaaaaggaaaggtatgtatttg

SEQ ID NO: 48157 - DNA, 383 bp, Gossypium hirsutum
  Clone ID: LIB3196-047-P1-M1-H4
cccacgcgtccgcttaaacccttcctttcattccttctacctcctcttcattattatctttcctttaagcttttgcaattaatttctttgctttcaaagagatgtgtggtggtgctatcatttctgaattcatcacccggaaaggcgcccatggcgtcactgcttctgacatctggcccaattcccctttcgtcaaaaatggctttagctctgactcaactcaatccttccattatgactcactcgccctctgtaaaaggaaccgaccccaatcctcagatggggtgcaagtggagaagaaagtgaaaaggcagagaaaaaacctatacaggggcatacgccagcgtccatggggcaaatgggcggcggagatccgtgacccg

SEQ ID NO: 48158 - DNA, 395 bp, Gossypium hirsutum
  Clone ID: LIB3196-047-P1-M1-H5
atcattgatgtcctacccagctaaaacagaggccaggagccagggaggaaaagcagtcaggccacacaccactgctcccgaaatggacttctctgcaagcctgactcctaaaactgtgcgttgtaccctgaaaccagctttatccatagcttctgcgataaatggctgtaagtcttggactccttgctccaaaagcagcaactcagcaatggaaccttccagctcccaacccttgctagtgcccacgggctttcccaaagggcaagagaacatttctcctcctataattgccatctctttgttctcccgacatggtgaacaccatccggactgcgtgtatgtcccaaattacaattctttctttgctaatgaaatatgaaatttagaggctcttc

SEQ ID NO: 48159 - DNA, 386 bp, Gossypium hirsutum
  Clone ID: LIB3196-047-P1-M1-H6
tgaatatttcattacagaagacaatgtggggatgcttaagttagcaaaagaagcaaactcaatcctgttcgattaccgtatcccaaccctcaccacctgcggtggcagcgcagccatggaaaatcaattacaaatgaacggcttaccaatcagtctctacgccccagaaacagtaggttgcgttgtagttgacaaacaaggtcattgcgctgccgctacttccaccggtggattaatgaacaagatgaccggaaggattggtgactcgccgctgattggttcagggacttatgcttgtgacttagtggctgtttcatgtaccggtgaaggtgaagccattatacgaagcactttggctagggaagtagcggcggtgatggaatata

SEQ ID NO: 48160 - DNA, 346 bp, Gossypium hirsutum
  unsure (1)..(346): unsure at all n locations; Clone ID: LIB3196-047-P1-M1-H7
ggaaatgatactctgaatcatagaactataatgaaatatacgatcaaccaacatttatcgaatttgaaaaagagtcagaagaaatggttcgatcctcttattttgatttctcggaccgagagatccatgaatcgggatcctaatgcatatagatacaaatggtccaatgggagcaagaatttccaggagcatttggaacatttcgtttctgagcagaagagccgttttcaaagagtgttcgatcgattacgtattaatcaatattcgattgattggtctgaggttatcgacaaanaaaatttgtctaagtcactttcgttctttttgtccaaggtacttctctttt

SEQ ID NO: 48161 - DNA, 441 bp, Gossypium hirsutum
  unsure (1)..(441): unsure at all n locations; Clone ID: LIB3196-047-P1-M1-H8
ggcgacactataaaacaagtcactataaggaaagctggtgcgcccgctcgctgccgtcccgggatcagggttccgccacacacacccggctaagtaaggggttgatgggtgcatgtattttaccatgttggccagcatggtctctaactcctggcctcacgtgatccacctgcctcagccttccaaagtgctgggattacagctgtgagccatcatgcccagccgagtgtgcatgttttcaatctctccctgttctgatgctcaaagttacaactacacaaacactgcaactggctttgctttttgtcctgatagtatctcacaagggttccctgatgcaggcagtcttactttctagacaacctaccaaccgtcgtncacaacacacttctggggccataataagggaacacttttgtaatgaaatgtgagtgaaatcag

SEQ ID NO: 48162 - DNA, 386 bp, Gossypium hirsutum
  Clone ID: LIB3196-047-P1-M1-H9
aaacatttctctactgcaatcaagacagggaaaggaagagttgatcttctcaccaaattcacacacaactcggatattcttcgtggcattgagaattatcgactggccctccttgttgccagtccaaagtcattcgtagtcccaaatcatttcgatgctaacgccatatttgttgtcactcaaggacgtggaacactcacgctgatccatgaagataagagagagagctttaacattgaaactggagacatcatctatgttcgtgctgggactcctctatatttgatcaacagagatgacgacgagaaactgtttatcgtcaagttattgcaacccatcaatcaaccagatcattacgaggtattttatggtgctggtggtgcaaa

SEQ ID NO: 48163 - DNA, 384 bp, Gossypium hirsutum
  Clone ID: LIB3196-048-P1-M1-A10
atgttcttgaaagccagcagtgaataggccttttccagtgtagagcgtgaaattcctttggggaatttaaacacatttttctttaatggctgaaatgaagtgttgcttttttcatgaaagttttatgtatttgacctatttaattcttttttcttcaggaaataaaaagtggcactttttttttaaaaaaatttattattattatactttaagttctagggtacatgtgcataacgtgcaggtttgttacatatgtatacttgtgccatgttgctgtgctgcacccatcaactcgtcagcacccatgaactcgtcatttacatcaggtataactcccaatgcaatccctcccccctccccctgccccatgataggccccggtgt

SEQ ID NO: 48164 - DNA, 358 bp, Gossypium hirsutum
  Clone ID: LIB3196-048-P1-M1-A11
atttcatcagtttctccgctgctaccatgagcctctccttatccttcactcatccaatcttaagccgccacgtctattccgccgtatttcctcctccccggtttctcttcctctctcctctcatccccaccacgtcccgtttccctattctctaccgcgcgccccaacgcgccaccgcactctcagccaccgctgtaaccgcctctatcttccgagataccgctgcttccgcctctgtctttgctggcgcttatgctctcgtcttcaccttcgatattctcactcaaaaggagctcattcagcagaatgtaagtagaaaattggtgcatatattatctggattactttttgcattttc

SEQ ID NO: 48165 - DNA, 343 bp, Gossypium hirsutum
  Clone ID: LIB3196-048-P1-M1-A12
cccacgcgtccgctctccgatctcattgactcacaaatgaatccttccattctatcaaacgttcctttagatctctatcccatgtttcagatctctcttctgtgattcagttttttgacgtttttagaaagaaaaagaattatcttttgattaaatctcacgatccctcgattttctctcacaaacccagttttttctttcatttttcgtaatgggtttcactccaattcgctttctcttcattgtttcctttttcttcttcgttttcgcttccgttactttttctcaggactcaggttttcaagctgagaaggaggaatctgatgggtcaattaaagatctc

SEQ ID NO: 48166 - DNA, 387 bp, Gossypium hirsutum
  Clone ID: LIB3196-048-P1-M1-A3
atggcggcccggccggccggtggctgcaccacgctgggtcctgcgctggagtcagcggcctgctgaggagccgggggccgggcgggagagccggggcgagccggccgctgagcgtgtcggcgcgggcgcggagcagctcagaagataaaataacagtccactttataaaccgtgatggtgaaacattgacaaccaaaggaaaagttggtgattctctgctagatgttgtggctgaaaataatctagatattgatggctttggtgcatgtgagggaaccctggcttgttcaacctgtcacctcatctttgaagatcacatatatgagaagttagatgcaatcactgatgaggagaatgacatgcttgatctggcatatggactcacag

SEQ ID NO: 48167 - DNA, 391 bp, Gossypium hirsutum
  Clone ID: LIB3196-048-P1-M1-A4
atcgggaaattgtgcgcgacatcaaggagaagctgtgctacgtcgccctggacttcgagcaggagatggccaccgccgcatcgtcctcttccctggagaagagctacgagctgcctgatggccaggtcatcaccatcggcaatgagcggttccggtgtccggaggcgctgttccagccgtctttcctgggcatggaatcttgtggcatccatgagaccacctttaactccatcatgaagtgtgacgtggacatccgcaaagacctgtatgccaacacggtgctgtctggtggcaccaccatgtacccaggcattgccgacaggatgcagaaggagatcaccgccctggcacccagcaccatgaagatcaagatcatcgcacccccagagcg

SEQ ID NO: 48168 - DNA, 372 bp, Gossypium hirsutum
  Clone ID: LIB3196-048-P1-M1-A5
cggacgcgtgggggatcattcttaatctctatatttctcgatatttaaaattttagtctcgatgcaaatgaaagtcattagatccatatactgcattttttaaagtaatatgtgaaaatagcacattgacatgatgctacacatatgataatatgtttttagcattatattttgaaaataacataacttaatgaatttaacaactattatttggcaagaactgaaatttcaaagttcaaaaagtattaaggattgaaaattacaaaattaaagtatatgaagtaacgactagtttctcattgcttttggaaagtgcagtgaaaaaacgcttataaaaaactttgtttaaaatttgagtgtttagtattatag

SEQ ID NO: 48169 - DNA, 374 bp, Gossypium hirsutum
  Clone ID: LIB3196-048-P1-M1-A6
cccacgcgtccggtttaatcagtattatagattgttcatccagagatctaagcttattagcttaagctataaaaatggtgaaaagatcgttgggctttttctttcttctcctcattgtcttagcctcccaatggggggtgcagccaactgaggcaagggtttgccagtcacaaagccataagttccacggtgcatgtgtgagtagccacaactgtgcgatggtgtgcagggacgaaggtttctccggcggcagatgtcgaggattccgtcgccgctgcttctgcactaagctttgctaatgcaagcttgcccttagctcatattttaaggatttttcttgagtaaaagacctttatgtttttcgtgcatgcatg

SEQ ID NO: 48170 - DNA, 316 bp, Gossypium hirsutum
  Clone ID: LIB3196-048-P1-M1-A7
ccgacccgtgggcgggcgcgtgggcttattctagcgatattaccaggggtcaatttgagagatgaagcttcaagaggcatgggtggtggttccgtgggtgggtttggaaccacccacattttggattttgacctttaccaacctggttattggcttaatatggaaggttggatggccatgggtggagctcaacttctcatattggggatttgggccggcattactaggcattcattacgcttgaagggttggctggttgttgtgtggggaagccctgttgtgttcttgggaatattccacttttcaccttataaag

SEQ ID NO: 48171 - DNA, 366 bp, Gossypium hirsutum
  Clone ID: LIB3196-048-P1-M1-A9
gcattgtgaggtttacagttaagtcaaagagcaaaagagaaaaggaaaatgagagcttcaagtgagtttttggctaccttggttcttgtgctggtttcggtttcttcagtggctcatggagatccccttgttcctgcactcatcatctttggggactcggttgttgatgtggggaataacaacaatctcaacacacttatcaaatcaaactttccaccatatggaagagattttgttaatcacaggccaactggaagattctgcaatggaaaacttgctacagatttcactgctgagtaccttgggtttacttcatacccaccggcttaccttagtcgagatgccataggaaatgctctcctgact

SEQ ID NO: 48172 - DNA, 173 bp, Gossypium hirsutum
  Clone ID: LIB3196-048-P1-M1-B1
cgaaaaatggctgatttgagagacgaacacggcaaccctattcaactcaccgacgaacacggcaacccgggtcaactcactggcgaacaccggaaccccatttatgtcaccgggtttggcaccaagcattccacgacgacaaccgcactggcgggtttaatgggatatgggac

SEQ ID NO: 48173 - DNA, 385 bp, Gossypium hirsutum
  Clone ID: LIB3196-048-P1-M1-B10
atgtggaggaagcagctactcctatggcagtggtcttggcgttggaggtggcttcagttccagcagcggcagagccattggaggtggcctcagctctgttggaggcggcagttccaccatcaagtacaccaccacctcctcctccagcaggaagagctacaagcactgaagtgctgccaccagctctcggtcccacagttctcaggcccctctctggttgcagagccctctcctcaggctgcctgtcctctcgtggcctccagtctcccctgctctcccaagtagagctggggatggatgcttagtgccctcacttctctctgtctataccagccccatttgagcacccattgctcaccatcagatcaacctctgattttacatc

SEQ ID NO: 48174 - DNA, 380 bp, Gossypium hirsutum
  Clone ID: LIB3196-048-P1-M1-B11
atcacaggtgtcgtgaaaactacccctaaaagccaaaatgggaaaggaaaagactcatatcaacattgtcgtcattggacacgtagattcgggcaagtccaccactactggccatctgatctacaaatgcggtggcatcgacaaaagaaccattgaaaaatttgagaaggaggctgctgagatgggaaagggctccttcaagtatgcctgggtcttggataaactgaaagctgagcgggaacgtggtatcaccattgatatctccttgtggaaatttgagaccagcaagtattatgtgactatcattgatgccccaggacacagagacttcatcaaaaacatgattacagggacatctcaggctgactgtgctgtcctga

SEQ ID NO: 48175 - DNA, 389 bp, Gossypium hirsutum
  Clone ID: LIB3196-048-P1-M1-B12
atggtttccggaaagtggtccacatcgagcagggtggcctggtcaagccagagagagacgacacggagttccagcacccgtgcttcctgcgcggccaggagcagctccttgagaacatcaagaggaaagtgaccagtgtgtccaccctgaagagtgaagacataaagatccgtcaggacagtgtcaccaagctgctgacggacgtgcagctgatgaaggggaagcaggagtgcatggactccaagctcctggccatgaagcatgagaatgaggctctgtggcgggaggtggccagccttcggcagaagcatgcccagcaacagaaagtcgtcaacaagctcattcagttcctgatctcactggtgcagtcaaaccggatcctgggggtg

SEQ ID NO: 48176 - DNA, 374 bp, Gossypium hirsutum
  Clone ID: LIB3196-048-P1-M1-B2
cggacgcgtgggttcaggtacaaacatattctccaaatttatagatcgttgttgtactatgtttcgtcctcgaattaccggtagcctcttcctcttccacgtcccccccaacctcgacccctacctcttccaccacccctcccaccataagatatgccttccaatgctctgttcacaagctgattttgcatgccaccagctccacggcccttctttgtcgcaaagttattagatccattagctgcagtagaaggtcgctttaccctgcacaacaattgcacagttgaatttgtttcgtttcagggtcacacagtaaaaagaatcctcttgaaacatgaatgacaagggagatagtttatgttgttcaatactac

SEQ ID NO: 48177 - DNA, 373 bp, Gossypium hirsutum
  Clone ID: LIB3196-048-P1-M1-B3
aacacgtagatatggcgattaacccttctttgctctttctttcccttctttttctcttcaatggctgcctagctcgccagaccttttcgtcacagcagctttcaacgttgaccacgacatcattaggaaaatccaacgtgtacgaggaaatagaggcaccatcatcagagtcagggacagactccaagtcgtaacaccacccagaatggaggaagaagaacgtgaggagcgccagcaggagcagcgataccgccatacgagaggagggtctcaagataatggcctcgaggaaactttctgctccatgaggatcaaggagaaccttgctgaccctgaacgtgccgacattttcaacccacaagccggtcgtatt

SEQ ID NO: 48178 - DNA, 74 bp, Gossypium hirsutum
  unsure (1)..(74): unsure at all n locations; Clone ID: LIB3196-048-P1-M1-B4
naaaaaaaaaaaaaaaaaaaaaaaaaggaaaaaaaaaaaaaaaaaaaaaaaaaaaaaaaaaaaaaaaaaaaaaa

SEQ ID NO: 48179 - DNA, 353 bp, Gossypium hirsutum
  Clone ID: LIB3196-048-P1-M1-B5
gttcgttggagcttagcccgagcacttgcaaaactggcattgcttcccattgtgataatggaaaggatggtgatgtagctcttatagatgtaggaaccggccttgagtatttcacacttggctatgtttctccttcattgaaaatcgatctgagtggctgcaaagcatcttgtgttagtagttgccactatatagttatgttctatgacaacagttcgagggattgtttcttgtttaatgacgttgggagctttcagagatctaaacacaggtccaatttggttgcttttgtgatgtcgagaaatgaaaatggtggagagggtgcaaaagggacaagagccttcccatatgtt

SEQ ID NO: 48180 - DNA, 150 bp, Gossypium hirsutum
  Clone ID: LIB3196-048-P1-M1-B7
atgggatgtggtttccgttaagctggacaacagtgcctccggagccagcgtggtggccatagacaacaagatcgaacaggccatggatctggtgaagaatcatctgatgttgcttgagagagaggtgaaatctgaggacaatccaagctg

SEQ ID NO: 48181 - DNA, 334 bp, Gossypium hirsutum
  Clone ID: LIB3196-048-P1-M1-B8
atgaaacgaatgcctaaacaggaaacttggattggtaaccttccaattcccaccttatcttgattttttatatttgtaaacttttccttttgttgcaaaattagattctttacttcgtgaattttttttttaagtaagattctttacttcgtcttggacggcttgacttgtttgtgatgattttgtattttggctttcatacttgtttggattaataatggttttctcttctttcttgccctttcattacctttgaaattgtgaggtcgttcattgttgcaattattatggaattcggcgaaggtcctttttttttttaataattacttaatct

SEQ ID NO: 48182 - DNA, 358 bp, Gossypium hirsutum
  unsure (1)..(358): unsure at all n locations; Clone ID: LIB3196-048-P1-M1-B9
cccacgcgtccggctgtccagtcatgtgatgcttcactgctgctggactccacaagaaggagcttgtctgagaaggagacagacaggagctttggcctaaggaatttcaggtacattgagaccatcaaagaagctgtagaaagggaatgtcctggagttgtttcttgtgctgatatccttgttctgtctgctagagaaggcatcgtttcgttgggaggcccttacattcctctcaaaactggaagaagagacggtagaaggagcagagcanatgttgtggaggagtatcttccggaccacaatgagaccatctctggcgttctcgacaggtttgccgccatgggtattgacacccctg

SEQ ID NO: 48183 - DNA, 239 bp, Gossypium hirsutum
  Clone ID: LIB3196-048-P1-M1-C1
atccctgatgttggctttgcttgtaagaagtttaatggctgctctggcctgctatggcattttggctgcaattttgtctggcagtgggtggagaactggtatcaagaaagggaaccgggagtagtgatggagataatagtgggggtggggacagagaaagacataagggactgtccctcttgaactctgccttttggcacattggagaatgggacaggggagatgacaataatggaacc

SEQ ID NO: 48184 - DNA, 364 bp, Gossypium hirsutum
  Clone ID: LIB3196-048-P1-M1-C11
cggacgcgtgggcaactgccgaacgagaaattgttcgtgacatgaaagaaaaacttgcttatgttgctctcgattttgagcaagaattggagactgccaagagtagttctgctattgaaaagagttacgaattgcctgatggacaagtaatcacaattggagcagagaggttccgttgccccgaagtactcttccaaccatctctgattggtatggaagcagccggaatccatgaaactacatacaactccatcatgaagtgtgacgttgatatcaggaaggatctatacggaaacatcgtgcttagcggtggatcaaccatgttccctggtattgccgataggatgagcaaggaaatcacagc

SEQ ID NO: 48185 - DNA, 368 bp, Gossypium hirsutum
  Clone ID: LIB3196-048-P1-M1-C12
ctcacgcgtgcgattatgtaggagaaacttgcaattgctgatctggtacattttgattttatggacccacctgctacggagacattgatgcgtgcattgcaagtgctgaattacttgggagcattggctgatgagggtaacttaacagatactggtgagagcatgagtgaatttatcttggatcctgaaatgtcaaagatgctcgtagctagttctgagttcaactggtcaaatgagattctttcagttgccgtcatgcttatcagtacccaattgctttgtacgggctacggaggcacaaaaagctgtagatgaagcaaaagctctgtttgggcatatcgatggtgatcatctcacacttttgaacg

SEQ ID NO: 48186 - DNA, 269 bp, Gossypium hirsutum
  Clone ID: LIB3196-048-P1-M1-C2
ggtggatcttcgttcaaccacgcctaataaccgttcggatttttctcaaacgtgaaaaaaatggggctgtttttcaccaagttattcagccggctatttgccaaaaaggagatgcgcatactgatggttgggcttgatgctgctggtaaaaccaccattctttacaagctgaagttgggagagattgtcactactattcccaccatcggtttcaatgttgagaccgttgaatacaagaacatcagcttcactgtttgggatgttggcgg

SEQ ID NO: 48187 - DNA, 247 bp, Gossypium hirsutum
  Clone ID: LIB3196-048-P1-M1-C3
ccacaatggaccgtcaacgctaacaaaatactttacatgttaaaaggctgtgccaaattccaggtggggaacaacaccggcgacgcagtgttcgacgataacgtggagcaaggtcagctcctgacggtgccacagaactttgcgttcatgaaacaagcaggaaacgaaggagccgaatggatttccttcttcaccaatagcgaagccaccaacaccccaatggttggagagtgtctcttttatgcga

SEQ ID NO: 48188 - DNA, 390 bp, Gossypium hirsutum
  Clone ID: LIB3196-048-P1-M1-C4
atgttcttcgccccctggtgtggacactgcaagagacttgctcctgaatatgaagctgcagctaccagattaaaaggaatagtcccattagcaaaggttgattgcactgccaacactaacacctgtaataaatacggcgtcagtggatatccaaccctgaagatatttagagatggtgaagaagcaggtgcttatgatggacctaggactgctgatggaattgtcagccacctgaagaagcaggcaggaccagcttcagtgcctctcaggactgaggaagaatttaagaaattcattagtgataaagatgcgtctgtagtaggttttttcgatgatttattcagtgaagctcactctgagttcctaaaagcagccagcaacttgagggat

SEQ ID NO: 48189 - DNA, 390 bp, Gossypium hirsutum
  unsure (1)..(390): unsure at all n locations; Clone ID: LIB3196-048-P1-M1-C6
atcagatttgggtggggaattaatgctaatagttaaattaaaagtagattgtttccatttctctgtaggatgttgttgataaatgcttttgtataatcacctatttcctttaaaacacctatttactaaaagagacaaagtaaaaatatatttatactttatgaattgttttcagtgactaatttctttgtaaaacttaaatatttaagtttgtaggtttaaactgttaacggtgtatttaggcaatttaaattgggttatgtatctagatgtagaaaaacttactgcattttgcccagtatctaatttacactaatacatttatgctgaaacctgtaccttaaaacatttttaaataggtatattgagatcttcagaagtagcangagt

SEQ ID NO: 48190 - DNA, 387 bp, Gossypium hirsutum
  Clone ID: LIB3196-048-P1-M1-C9
atggaggatgaaacccggccggggggataccattgcagtcaatgtgacagagtcctgatgtccatgcaggggctgcgttctcatgagaggagccacctggccctggccatgtttacccgcgaggacaagtacagctgccagtattgctcctttgtttctgctttcaggcacaatttggatcgccatatgcaaacgcaccacggacaccataaaccattccgatgcaaactctgctccttcaagtcctcctataacagccggctgaaaacacatatactcaaagctcatgctggtgagcatgcctacaagtgttcttggtgctcgttctccaccatgacaatcagccagctgaaggaacactccctcaaggtccacggaaaagccctg

SEQ ID NO: 48191 - DNA, 189 bp, Gossypium hirsutum
  Clone ID: LIB3196-048-P1-M1-D1
gcttagtggtggatccaccatgtttcctggtattgccgatagaatgagcaaggaaatcacagctcttgcaccaagcagcatgaaaaataaaggggtagcaaccccaaagaggaaatacaaggtcctgaatggtgggtctaatttaacttctcttaatacattccaacagatgtggatatcaaaagccga

SEQ ID NO: 48192 - DNA, 372 bp, Gossypium hirsutum
  Clone ID: LIB3196-048-P1-M1-D10
acaaaatactctacatgttaagaggctgtgccagagtccaagtggtgaaccacaacggcgacgcagtgttcgacgataacgtggagcaaggtcagctcctgacggtgccacagaactttgcgttcatgaaacaagcaggaaacgaaggagccgaatggatttccttcttcaccaatagcgaagccaccaacaccccaatggctggaagtgtctccttcatgcgagcactgccggaggaagtggtggcagcgtcgtatcaggtgtcaagagaagatgcaaggcggattaagttcaacaacaaaaacacctttttcttcactccttcacagtccgagaggagggccgatgcttaaactccagccgatgccaatg

SEQ ID NO: 48193 - DNA, 363 bp, Gossypium hirsutum
  Clone ID: LIB3196-048-P1-M1-D11
cacacatcttgctagccgattcttctccatttagcaaccaatgcacatatgtgctcacacaaaaatgctaaaaaggaggttcaagaatcatcaagccatcatcacatgcatcattaacaagcttcatattttgcatgcaatggcattaacatgacctccacctaggccgaatcttaactcatcctcatgcctcatcaccacaacatcaaacatcaaccaagaatgatgcatccatggtcaagtgccatttccatcacatagcaagatttagaccatgggctaggtagaactcaagctaacaactaaaacatgcatgcatctcatggaacatcatcaaacataccttagcctagctacatgcat

SEQ ID NO: 48194 - DNA, 240 bp, Gossypium hirsutum
  Clone ID: LIB3196-048-P1-M1-D12
cccacgcgtccgcttataactgtgttgttaaagacaaaatttttaaaataaattaaattctatatataaaaagaaaatatatatccttatatttcctatagaacatataatacatatttcttgtacaaatattaaaatatatctaataaaaaaataattaacacatgattcattacccataagatagaaatcacatgatacttaaattgtgttatttttaagtttcaatatagtacattc

SEQ ID NO: 48195 - DNA, 357 bp, Gossypium hirsutum
  Clone ID: LIB3196-048-P1-M1-D2
cccacgcgtccgcccacgcgtgcggtgattttgtttttaaaaataagacttgatttttagttttaatatatctcttttttattattttgagataaatttttcattagtttttttttgggtcttcggaattggaatttttggggaatggaggtttcggtaattaggagttgttctcaggcaacaaaccttaaaacagaattagggtttaaggattcaaggtttagtttcgggaaatttaatgagaaactatttttccggaaaccaaacagtgtttcgtttcagagtccattaaggaggggaaaatcttggctcagaataacagcgcaagctgcccaatctgatcccctccctaaatcg

SEQ ID NO: 48196 - DNA, 314 bp, Gossypium hirsutum
  Clone ID: LIB3196-048-P1-M1-D3
atttcgggatttttttattaaatagtttattccatggtttccttttttttaattatctaaattttaaaaaaaattaattatttattttggggggtgggttttggttttttttttaccctattaaataaatttttttttaccttaccattttttccaccttccacttccttgtgtaaaagtattattggaaattaatttggaaatttggtaaaatacctggttttgatattgatttttcctgcggttaattttttttaaaaattaggtggcttacctgtaattaattaaaaaagggattcctttatttggatttt

SEQ ID NO: 48197 - DNA, 384 bp, Gossypium hirsutum
  Clone ID: LIB3196-048-P1-M1-D4
atcgtccgccccgcgagcacagagcctcgcctttgccgctccggcgcccgttcacacccgccgccagctcgccatggatgatgatatcgccgcgctcgttgtcgacaacggctccggcatgtgcaaggccggcttcgcgggcgacgatgccccccgggccgtcttcccctccatcgtggggcgccccaggcaccagggcgtgatggtgggcatgggtcagaaggattcatatgtgggcgacgaggcccagagcaagagaggcattctcaccctgaagtaccccatcgagcacggcatcgtcaccaactgggatgacatggagaagatctggcaccacaccttctacaatgagctgcgtgtggctcctgaggagcaccccgtgct

SEQ ID NO: 48198 - DNA, 389 bp, Gossypium hirsutum
  Clone ID: LIB3196-048-P1-M1-D5
atgcttgcaggcttggaagtcctaagtgatgaccctgatctagtgaaggtggttgagtctttaacttgtggaaagatctttgcagtggaaatacttgacaaagctgacattccacttgttgttctatatgatacctcaggagaagatgatatcaatatcaatgccacctgcttgaaggctatatgtgacaagtcactagaggttcacctgcaggttgacgccatgtacacaaatgtcaaagtaactaatatttgctctgatgggacactctactgccaggtgccttgtaagggtctgaacaagctcaatgaccttctacataagatagaggactacttccattgcaagcacatgacctccgagtgctttgtttcattacccttctgtgg

SEQ ID NO: 48199 - DNA, 375 bp, Gossypium hirsutum
  Clone ID: LIB3196-048-P1-M1-D6
cttgggccactttgacaatttggcctgattttcaactaagtatggatggatttcttgattgggctgggaatttgcttattgggcctcgccttcaagaatttgggcttttgtgactcgtatcattccccccttcctcaaaaagattcgtcctcgaatctgaaaaatcaaatgaactcgactttcctctatcgaacgggactaatggcaattgagtccactaaaaagaatagccatgagatagtaaatagcaacggaaacaagcttgtagtccaatcataagcataacagaacaggtataacgtatgtgaatggacagattcagattaccatgcaaacaatctaatttactcaccactgcctcgtcaaatatttgaa

SEQ ID NO: 48200 - DNA, 365 bp, Gossypium hirsutum
  Clone ID: LIB3196-048-P1-M1-D7
cccacgcgtccgcaccgttggcaacggcaagagcaagggcccgaacggaagcaacaatgtgtgaaggaatgcagggaacagtaccaagaggatccatggaagggagagagagaaaacaagtggagagaagaagaagaggaggaaagtgacgaaggagagcaacaacaaaggaacaacccttactacttccatcgcagatcgttccaagaacgattcagggaagaacatggcaatttcagagtcctccagaggtttgctgccaaacatcatttacttaggggcatcaacgagttccgcatttgccatttagaagcaaaccccaacactttcgttctcccacaccattgtgacgcggagaaaattta

SEQ ID NO: 48201 - DNA, 303 bp, Gossypium hirsutum
  unsure (1)..(303): unsure at all n locations; Clone ID: LIB3196-048-P1-M1-D8
gggatggagcccaccctggaaagtncacagtgttcattcgggggtcacacaaaacacaaaggccttcaccatggagtttggcttgaactgggttttccttgtcctaatttaaaaaggggtccaggggggggggtccttgggggagtctgaaggaggttgggtccacccgggggggtccttggaactttcttggggagcctttggattaaccttaagcttttttggcttaagtggggtccgccaggttccaggaaaggggctgcaggggtcttaaatatataaaaaggaggttcttttatatac

SEQ ID NO: 48202 - DNA, 342 bp, Gossypium hirsutum
  unsure (1)..(342): unsure at all n locations; Clone ID: LIB3196-048-P1-M1-D9
atcaacttttcctgccttncccacgccccaaattatttgggtgttttggtacctttctcacatctggaaaagagacatactgtggctgattctttttccatatccggggaaagtctgttctggtacctaaaggtgagtgagagctttctttgatttggataaaacagtccctccagcagctattttgggttcactcccagcttttaatgattgttccccgggggaccataaatgtaaaggaggttagttaacaaggttcagtgtgatggtgtagttgcttttcttgtttgccaaaaccatttgatcaggcacaagaacttgttttagtgagcgtcctttatt

SEQ ID NO: 48203 - DNA, 384 bp, Gossypium hirsutum
  Clone ID: LIB3196-048-P1-M1-E1
atgaccgcctggcttcctacctggagaaggtgcgcgccctggaggaggccaacgccgacctggaggtgaagatccgtgactggcacctgaagcagagcccagctagccctgagcgggactacagcccctaccacaagaccattgaagagctgcgggacaagatcctgaccgccactattgaaaacaaccgggtcatcctggagattgacaatgccaggctggctgcggatgacttcaagctcaagtatgagaacgagctggccctgcgccagagcgtggaggctgacatcaacggcctgcgccgggtgctggatgagctcaccctgtctaagactgacctggagatgcagatcgagagcctgaatgaggagcctgcctacatga

SEQ ID NO: 48204 - DNA, 377 bp, Gossypium hirsutum
  Clone ID: LIB3196-048-P1-M1-E10
atcttctctccactcagccaactgcttgctcgctcacctgcctccttggcaccatgaccacctgcagccgccagttcacctcctccagctccatgaagggctcctgcggcatcgggggcggcatcgggggcggctccagccgcatctcctccgtcttggccggagggtcctgccgcgcccccagcacctacggcgggggcctgtctgtctcctcctcccgcttctcctctgggggagcctacgggctggggggcggctatggcggtggcttcagcagcagcagcagctttggtagtggcttcgggggaggatatggtgctggcttcggtggtggcttgggtgctggcttgggtggtggcttgggtggtggctttgct

SEQ ID NO: 48205 - DNA, 371 bp, Gossypium hirsutum
  Clone ID: LIB3196-048-P1-M1-E11
atctccccatcaccatcctcttcctcttgccttttcaatggctttaatgcttgataattgtgaaggcatattactatcacttgactcacacaaaccagtaccagctccatttttaaccaaaacttaccaacttgtcgacgatcccaccaccgatcacattgtttcatggggtgaagatgatactacttttgttgtatggcggccacccgagtttgctcgtgatcttcttcctaattacttcaagcacaataatttctctagctttgtgagacaactcaacacttatggttttaggaagattgtaccggatagatgggaatttgccaatgagtacttcaagaaaggtgaaaaacacttgctttgtgagatcc

SEQ ID NO: 48206 - DNA, 370 bp, Gossypium hirsutum
  Clone ID: LIB3196-048-P1-M1-E12
cggacgcgtgggggcgattaacccttctttgctctttctttcccttctttttctcttcaatggctgcctagctcgccagaccttttcgtcacagcagtcccaaaatgagtgtcaaatcaataggctccgcgcctctgcaccccagacccgaattcgctccgaagccggcaccaccgagtggtggaaccccaactgtcaacagctcaggtgtgctggtgtatctgtaatgaggcagactattgaacctaatggccttgttttgccttccttcaccaatgctcctcagcttctctacattgtccaaggaagaggtattcaaggtattgtgatgcctggatgtgccgaaacattccaggattcacagcaatgg

SEQ ID NO: 48207 - DNA, 314 bp, Gossypium hirsutum
  Clone ID: LIB3196-048-P1-M1-E2
aaccacgtggccttgtaaattgtggtaacagctgttatgccaatgctgtccttcaatgcttgactttcactcctcctctgactgcttactttcttcatggaatccattccaaagcatgtgcaaagaaagattggtgtttcacttgtgagtttgaaaaattaattttgaaggctaaagatgggaaatcaccgctgtcccctatgggaatactttcccaactacaaaatattggcagtcaacttgctaatgggaaagaggaagatgcacatgaatttttaaggtatgctattgatgctatgcaatctatttgtctt

SEQ ID NO: 48208 - DNA, 374 bp, Gossypium hirsutum
  Clone ID: LIB3196-048-P1-M1-E5
atttaataaattgaacttttttccacaaatccaagtataaataaaattttagaaaaccagtaacacgtggcacattttagtgaaccaatatgttgatttctttttcacataaaaaatttattttattcttctattttttttgtttattttaatatttaaaatttatttgttaaatctttcaaaatagatgaaaaaaattaacatttgttaattttgttaatgtgacattcacgtggtaatccacatgcatgtcacattagtaattaattaatttaaaaatgttaactatttaaataattttttaaaaaattaattaattactaatgtgacatctgcgtggtaattcacatatatgccatattaacaaagttaac

SEQ ID NO: 48209 - DNA, 364 bp, Gossypium hirsutum
  unsure (1)..(364): unsure at all n locations; Clone ID: LIB3196-048-P1-M1-E6
cccacgcgtncgctcatcttgaagaaactgggaatcgatgatctggtacattttgattntatggacccacctgctccggagacattgatgcgtgcattggaagtgttgaattacttgggagcattggatgatgagggtaacttaacaaagctgggtgagatcatgagtgaattccccttggatcctcaaatgtcaaagatgctcgtagttagttctgagttcaactgttcaaatgagattctttcagttgccggcatgctttcagtacccaattgctttgtacggcctatggaggcacaaaaagctgcagatgaagcaaaagctcggtttgggcatatcgatggtgatcatctcacacttttga

SEQ ID NO: 48210 - DNA, 361 bp, Gossypium hirsutum
  Clone ID: LIB3196-048-P1-M1-E7
cggacgcgtgggcgcctctggggctcttgttacttaacctagggctgttctttattttccttttctctctgttctttgttccgtttgctttacttctttctgcttcaatgtcgtttaggggattcagtcgggtatatctcactctgtcatgacttctttattggtttatttccttttgagatgttaaaaaaaaatgtttaatctgctatttcttatgttgatatcaatttattgtatctgttaaggtgactttctgctattgcatgttgtatatgttgtttggttttctgtaaaactttgaattacttctcatgttccaatcgatgctccaaaattaataaacatgggcacccatttttta

SEQ ID NO: 48211 - DNA, 218 bp, Gossypium hirsutum
  Clone ID: LIB3196-048-P1-M1-E8
acttttttaaactctacaccggaattaaattatcatgttctatctttaactcaattccatattatttatgaaaaccatgaggaactgatccctctatggggattagcgagtggaggtatgatttgttaactgttttatagggctactcaacggatcaactgtttgggaaaggaagaacctaaaccctagggagtcattaacgggggcatgaacccagc

SEQ ID NO: 48212 - DNA, 230 bp, Gossypium hirsutum
  Clone ID: LIB3196-048-P1-M1-E9
gcgaaagatggcaacaaggaagagaaaaaaggagaggaaaaagaaggcggtgaggaagtaaagaaagaagccggtggtgaagaagacaacaaagacaaaaaagaggaaggtgatcaaagcacggaagccaaggcagctgccgcagaagcggcggctgaaggttcgacggaagagacgaaagtggcggtggaagtgaagaaaaatgaatactgttactacccgccaaagta

SEQ ID NO: 48213 - DNA, 184 bp, Gossypium hirsutum
  Clone ID: LIB3196-048-P1-M1-F1
atgtgggatcgccgttcttgtttgtgtgtaggtgtcatagccacttgacaatgcaaatcttatgtatgacccttacttgtaagaccatcatccttggggttgagtcccctgtccccattgtgaatcgtaagggcaaaattccagataaggtaagcatttcttccaaacaggggaagcttatctt

SEQ ID NO: 48214 - DNA, 370 bp, Gossypium hirsutum
  Clone ID: LIB3196-048-P1-M1-F10
gtcgttaagtcgtgtaaatattgaactcgtagactggttgaagtaaaagcgaaaatggaagggattggattggaaggagatgggtcaaacggggaagctcttgggaagtgcttgagtgggttggtggacgatggtagcaccgagagtcatcgatactacctgtcccggagaactgtgctggagatgcttagggacagaggctatgccgtacccaacactgaaatcgacctctctctccatgaatttcgtgccattcacggccaaagccctgattttgatcgtctcaaactctctgttactcataaaactgactcttccaagcggacgctggtagttttctatgggcctggtgtagttaaagtcagtggga

SEQ ID NO: 48215 - DNA, 371 bp, Gossypium hirsutum
  Clone ID: LIB3196-048-P1-M1-F11
cttttcccttccgtttacattatatactcagatgcgaacatatttaacgaatccagattactgtttggttagagtgagcgaaaggagcgaagatgataaaagctgtgatggtgatgaacactcaaggcaagtcacgactggcaaaattttatgagtatctgtcagttgagaagcagcaggagcttattcgcggcgttttttcagtcttatgcagtagagctgagaacgtaagcaatttcatagatgcggaatcaatttttggtctggatagtcgtcttgtatacaagcattttgctacactttactttgtctttgtatttgatagttctgaaaacgagctagccgtgcttgacttgatacaagtttttgtg

SEQ ID NO: 48216 - DNA, 373 bp, Gossypium hirsutum
  Clone ID: LIB3196-048-P1-M1-F12
cttcaaggcatcctattcttaggggcatcaatgagttccgcttatctatcttagaagcaaaccccaacactttcgttctcccacaccattgtgacgctgagaaaatttaccttgtcaccaacggaagaggaacgcttacgttcttgacacatgaaaacaaagagtcctacaatatagtaccgggagttgtagtcaaagtcccagcaggaagcactgtgtacttggctaaccaagacaacaaggaaaagctaatcatagcagtgcttcaccgccctgttaataaccctggacaattcgaggaattcttcccagctggaagccaacgccctcagtcatatctccgagcctttagtcgtgaaattcttgagcctgc

SEQ ID NO: 48217 - DNA, 292 bp, Gossypium hirsutum
  Clone ID: LIB3196-048-P1-M1-F2
catcagaaagggtcggggtttcagtgagcgctactcttatgcacgaagatacacaaccccttctccagatcgttctcctgtgagggcctatcgcttcagtggtaggattgatcgtgagaggtattcaagttacaggcggtattcacctaggcgctatagaagccccccaagaggaagaactcctccaaggtatagaggcagaagaagccggacaagaagtctgtctgtatcaccgagcccgaggtatagaaatcgtcgctatggtcatagccgcagtcgtagcccaagtcgt

SEQ ID NO: 48218 - DNA, 120 bp, Gossypium hirsutum
  Clone ID: LIB3196-048-P1-M1-F3
cccacgcgtccgaacaaaccaaagcatattaaatagcaaaagaaaccaaatttaaattatttcatatctaatcaaattcaaaatgtgatgaataaattgattgtgaagtaaattatactc

SEQ ID NO: 48219 - DNA, 395 bp, Gossypium hirsutum
  Clone ID: LIB3196-048-P1-M1-F4
ataagatgagttgttagaccaatcctttagcttcctgcaatatagtggaggaaaatcaatggtagcaatgggaggttgtggtatccctagctgagttgtatgagcttttgctacctggtgcacctcagcctgaagattgctagagttgcttgcctcatgacatgggtcataatgggaactttgtcaagccccctacactggctgccaacataaatattcagtaccccaacgtcacccagctacagcccaacatcacccagctattcacctactagtcccaactacacgcctaccagccctaactacagcccaacctcttcaagctactcttcaacatcacccagttattccccgacctcaccaagttactccccttccagcccacgatacacacc

SEQ ID NO: 48220 - DNA, 394 bp, Gossypium hirsutum
  Clone ID: LIB3196-048-P1-M1-F5
atgggaagtgaatcgctctcgtcggcagtgtttgtggagggcctgaggagacagggaggctgtgccaggctggaggagtcttgtctttccgaagctggaaaggatcttacggaggttcgcctttccctgcctgggaagaatttcccctgtggtagcagcagcagcagcagcagcagcagcagcagcagcagcaacagcagcagcagcagcaccactgcctcctcttctggggcacagacagaatgcctgtgctagagcgctatttccacccagcagagctaggcaggaggtggacaggcccagaaggtgtgctgccctcctccccgggaagccggccggggtgccagcaggggccgctgccctgggacttgccagagatgatcaggatggtaaa

SEQ ID NO: 48221 - DNA, 385 bp, Gossypium hirsutum
  Clone ID: LIB3196-048-P1-M1-F6
atctcgctcgctcacctccctcctcggcaccatgaccacctgcagtcgccagttcacctcctccagctccatgaagggctcctgcggcatcgggggcggcatcgggggcggctccagccgcatctcctccgtcctggccggagggtcctgccgcgcccccagcacctacggcgggggcctgtctgtctcctcctcccgcttctcctctgggggagcctgcgggctggggggcggctatggcggtggcttcagcagcagcagcagctttggtagtggcttcgggggaggatatggtgctggcttcggtgctggcttgggtgctggcttgggtggtggctttggtggtggctttgctggtggtgatgggcttctggtgggcagtgag

SEQ ID NO: 48222 - DNA, 306 bp, Gossypium hirsutum
  Clone ID: LIB3196-048-P1-M1-F7
gtttcaaagatgattcctggttctgataagggcagattctttgcttttggtcgtgtcttttctggcaaagtctcaactggattgaaggttaggatcatgggtccgaactatgtccctggtgagaagaaagacttgtatgttaagagtgtgcaaagaactgtcatttggatgggaaagaagcaggagactgttgaagatgtaccttgtggtaacacagttgccatggttggtttggatcagtttatcaccaagaatgctactttgacaaacgagaaggaagttgatgcccacccaattcgtgcaatg

SEQ ID NO: 48223 - DNA, 359 bp, Gossypium hirsutum
  Clone ID: LIB3196-048-P1-M1-F8
ctcgcacgctctcatgattgtcctccgggaccgtcagtctccccaaacaccttctttccgagaaaaagaaaagctcaagagagaagaccatggccgatcaacttacggacgatcagatctctgagttcaaggaggctttcagcctttttgacaaggatggcgatggttgcattactaccaaggagctggggactgtgatgcgatcacttggtcagaaccctactgaggcagaactccaagatatgatcaatgaagttgatgctgatggaaatgggaccattgattttcctgaattccttaacctaatggcaaggaagatgaaggatactgattccgaggaagaacttaaagaggctttc

SEQ ID NO: 48224 - DNA, 287 bp, Gossypium hirsutum
  Clone ID: LIB3196-048-P1-M1-F9
gtcaacttaaatggccaaatgcataccaacatttacaatgcagatctcatggctcaaaatcataactcaaacatatcaagataacactagcctatacattccatataccatatatacaaagcgccaaaagtactaacgagatgatcaatagtgtgataacatctcccgacgatccccgagtctgagctagctttgataatctataaaataatgaaaaataaacatagtaagctttaaaagcttagtaagccatatacaaataaagttatcaaatgagtatttgcata

SEQ ID NO: 48225 - DNA, 384 bp, Gossypium hirsutum
  unsure (1)..(384): unsure at all n locations; Clone ID: LIB3196-048-P1-M1-G1
atcatggctgtaggtgccactgagtgtatcagccccaaggactctaccaaacccaataatggagtgcttgcaaaaattaccagccaccatggtggggaccacttttgaggtattgggcgtcttgaaaccatgattgatgctctggcatcctggcatatgaactaatggaccagcgtggtagtaggaggctcttcaataagcaagaatgctaactacgaaccggatgtgcttcttcactggacgcacgtggaagggatgtgtcttttgaggtttgaaaagcagagatgatgtcccaaaactagtgactgagttcctggcaaagaaatttgacctggaccagntgataactcatgttttaccatttaaaaaaatcaatgaaggatt

SEQ ID NO: 48226 - DNA, 367 bp, Gossypium hirsutum
  Clone ID: LIB3196-048-P1-M1-G10
ttcgcgcgattgcagaaaaacataacttcatgatatttgaagaccgtaaatttgcagacatcggtaacacagtaacaatgcagtatgaagggggtatcttccatatattggattgggctgatattgttaatgctcacataatctctggtcctggaattgttgatggtttgaaattgaagggtctgcctcgtggtagggggctgttgctacttgctgaaatgagctctgctggtaaccttgccacgggggactacacagctgctgccgtaaaaattgccgaacaacactccgattttgtcatcggtttcatctcagtcaaccccgcatcttggcccggtgcacctgtaaatccagcattcattcaggc

SEQ ID NO: 48227 - DNA, 389 bp, Gossypium hirsutum
  Clone ID: LIB3196-048-P1-M1-G11
atcgcgccggcgtccgccttcgggagctccctgctaggctcgggcggtagcgccttcgccccgcctctgcgcgcgcaagacgacctgacactgcgccggcggcccccgaaagcctggaacgagtctgacctggacgtggcgtacgagaagaagccttcgcagacagcgagctatgaacgcctggatgtcttcgcccggcccgcctcgccgagcctgcagttgttgccttggagggagagcagcctggatggactggggggcaccggcaaggacaacctcaccagcgccaccctgccgcgcaattacaaagtctctcctctggccagcgaccggcgttccgacgcgggcagctaccgccgctcgctgggctccgcggggccgtcaggcac

SEQ ID NO: 48228 - DNA, 388 bp, Gossypium hirsutum
  Clone ID: LIB3196-048-P1-M1-G12
atagaatttctgaagagaagaagtagcacaaagaggaccgacacaggttaaacgttctacgtcttgataaatcacagaagcagcacccaagccatcttaaagggatgttggaagaactaaatgcaagtgaagattttttcacagtagtggacacatagtatgtgtttataatttttgtcatcataccagatcacagaatttttttctacttttatctttcacaataaggatgattctacatctacaagagtacagagaagctacagtttatgtaagatacacataagagacatgccgctacagaagaatgaactctgacattcctatcttgtgaccctgggctgatgacttgaggagaaatgtgccattacaggggttggtgtccttt

SEQ ID NO: 48229 - DNA, 291 bp, Gossypium hirsutum
  Clone ID: LIB3196-048-P1-M1-G2
tgattattttctccataccagcataaatcaacaatggcaaagcgcagtttacttaaccaccctggctcttattttggtccttgccaaagcttcaatcacatctgtgaccggcgaaagcgaggaaaacccggatagcttggaacaggaaataaaggagcaaggccaccttgagcacttgccgaagtacattgaagaaaaatggggtggccaaagccgcgaccatattacccgcgggtaccttggcttatggtggccgcaacttgagaagattgataccccatggcaaagtta

SEQ ID NO: 48230 - DNA, 382 bp, Gossypium hirsutum
  Clone ID: LIB3196-048-P1-M1-G3
atgcgactttgaacccattttttggcagtgttcatattattaaactagtcaaaaatgctaaaataatttgggtgaaaatattttttaagtagtgttatagtttcatgtttatcttttaatatgttttgtgaaagttgtgtcttttcactaattacctatactatgccaatatttccttatatctatctgtagcatttatagtacatttagaagagaatatgaatatgaaacttaacactttataaggtaaaaatgaggtttccaagacttaataatctgatcaagttcttgttatttccaaatagaatgcactgggtctgttaagggctaaggataagaggaagataatgttacaaattattaatgaccaaatattctaaaa

SEQ ID NO: 48231 - DNA, 375 bp, Gossypium hirsutum
  Clone ID: LIB3196-048-P1-M1-G4
gagaaacaccttcccatgtatcaagaaatggcatccaagcccaatgtagagtatattgctggaggtgctactcaaaattcaatcaaagttgcacagtggatgcttcaaattcctggtgcaactggttacattggctgcattgggaaggacaagtttggggaggaaatgaagaagaactcaaaagctgctggtgttaatgttcaatatctcgaggatgaaactgcaccaacaggaacttgtgctgtttgtgttgttggtggtgaaaggtcactcattgcaaatctatcagctgctaactgctataagtctgagcatttgaagaagcctgagaattgggcgttggttgagaaggccaagtacttctatattgctgga

SEQ ID NO: 48232 - DNA, 372 bp, Gossypium hirsutum
  Clone ID: LIB3196-048-P1-M1-G5
ggctccttcagttttcactaccagaaatgtgggaaaaactctcgtcacccgtactcagggtaccaagattgcttctgaaggactcaaacaccgtgtgtttgaggtttccctggctgatcttcaaggtggtgatgaggatcatgcttacagaaagattcgtttgagagctgaagaggttcaaggaaaaaatgttttgaccaacttctggggaatgaattttacaactgacaaactgaggtctttggttcgtaaatggcaaaccctgattgaagctcatgttgacgtgaagacaactgacaattacactttgagaatgttctgcattggattcactaagagacgcccaaaccaggttaaaaggacttgttacgc

SEQ ID NO: 48233 - DNA, 367 bp, Gossypium hirsutum
  Clone ID: LIB3196-048-P1-M1-G6
gtgattgttgcagcaagccctcccacagaggatgctttgattgctacagaaccattgacgaaacaggatcttgttggataccttgcatctggatgtaagtctaaggaaaaatggaggataggtacagagcatgaaaagtttggttttgagatcaaaactctgcggcctatgaaatatgaacaaatagcagaattgcttaatggtatttcagagagatttgattgggagaaagtaatggaaggtgataaaattataggacttaaacaggggaagcaaagcatatcattggaacctggagggcagtttgagctcagtggtgcacctcttgaaactctgcatcaaacatgtgccgaggtcaattcacacc

SEQ ID NO: 48234 - DNA, 288 bp, Gossypium hirsutum
  Clone ID: LIB3196-048-P1-M1-G7
cccacgcgtccggtagaagaccaagtttaaaaatgcatagcataatttattattcatatgtataagaatctagcatgaaagtattaaattgtcatgacctgcccctgtgtattatatttttattagttagcttatatgttgattatgattaaattaattatttgatttgttaataatgctcgtgaccctaaatcgtcgacggagaagggttaagggtggtacatatttaagtgggtaggtttatttgggttttggataatgagtttaattgaatcgggttagtgattt

SEQ ID NO: 48235 - DNA, 361 bp, Gossypium hirsutum
  Clone ID: LIB3196-048-P1-M1-G8
gtagttacaaaaaactaggtgcacaacccctttactaaacactaacagatccatacttattcatttgacccctttaggcccaatctcgttcacatggcctatcaggtccaatcacattcatatggcccaccaggcccaatcacattcatatggcccatcaggaccaatcacattatatggcccatcaagcccaactacttcgcacctaacagttagatttacacaagcaagcccacgagcccatcgggcccatcgaggcccagaacagccctaacacctgagaacgctcgtgacggctttcagcattttttgatttctaacaaagaagggtgtgaatacacacctgtttatgagaacgccc

SEQ ID NO: 48236 - DNA, 359 bp, Gossypium hirsutum
  Clone ID: LIB3196-048-P1-M1-G9
caaaggttctctctctctctctctctctctattgttgaaggtcataagcttttgtatcaatggctgaagtccgtgaccgcaacctgcctcaccaagttcaagttcacccacagtaccgtttcgacaatacaaccggaggcggttacggtgcaaagaactatcacagtggaccatcaacaagccaagttctagccgtccttacacttctccccattggtggtacactgcttgcattagccgggttaacactggccggcaccgtcattgggctgatgctagccacaccgctgttcatcatcttcagcccagttcttgtcccagctgccattgccattgccatggcagtgacggagttcttg

SEQ ID NO: 48237 - DNA, 218 bp, Gossypium hirsutum
  Clone ID: LIB3196-048-P1-M1-H1
cgagaagtgagaaactattgtaaacctctcataatattctgagcttttttttttctttttggtgtcgataattttgatctgagccaaggttgataatcgagtttctataagaggttgatcctggcattccaaaaattgaattgtgtggctgaatgatctatggagactaaaggagggagaaagaagtctagtagtaataagtcattattctacgaagc

SEQ ID NO: 48238 - DNA, 389 bp, Gossypium hirsutum
  Clone ID: LIB3196-048-P1-M1-H10
atgccgacctggaggtgaagatccgtgactggtaccagaggcagcggcccgctgagatcaaagactacagtccctacttcaagaccattgaggacctgaggaacaagattctcacggccacagtggacaatgccaacgtccttctgcagattgacaatgcccgtctggccgcggatgacttccgcaccaagtatgagacagagctgaacctgcgcatgagtgtggaggccgacatcaatggcctgcgcagggtgctggatgaactgaccctggccagagctgacctggagatgcagattgagagcctgaaggaggagctggcctacctgaaaaagaaccacgaggaggagatgaatgccctgagaggccaggtgggtggagatgtcaac

SEQ ID NO: 48239 - DNA, 373 bp, Gossypium hirsutum
  Clone ID: LIB3196-048-P1-M1-H11
atggacagactgcggggcggacggtggacgctgggacgcgtttgtaactccggccccacggttccgacccccgccgccgtcgccgccatgacggggctagcgctgctctactccggggtcttcgtggccttctgggcctgcgcgctggccgtgggaatctgctacaccatttttgatttgggcttccgctttgatgtggcatggttcctgacggagacttcgcccttcatgtggtccaacctgggcattggcctagctatctccctgtctgtggttggggcagcctggggtatctatattactggctcttccatcattggtggaggagtgaaggcccccaggatcaagaccaagaacctagtcagcatcatct

SEQ ID NO: 48240 - DNA, 370 bp, Gossypium hirsutum
  Clone ID: LIB3196-048-P1-M1-H12
aaaaaacttaaaattctctctgaaatgagaggagagagagagaatgctgggttctggcctccgtcgagccgaaacttagttctcggcctcacgcgtctacgcgccgtcaccaattccttcctgtacggtggtcgaaggtccaaaccccgattttcaacgcaaataaaggttcgacccttctccttttcattatttacagtttatacatgtatttaaaagtatcacctttgagtacttagtcgattgaaatgcttaatgcgtgtatatgtgcgaaaataaacttttttgctgattctttagtttttattgattctctgtgtatattccagtgcatgcccttttacaggtgaaaagaaaggctttattgtcc

SEQ ID NO: 48241 - DNA, 374 bp, Gossypium hirsutum
  Clone ID: LIB3196-048-P1-M1-H2
atgcagcgtggtgagaatgcccttaaagatgcccacagcaagggcataaaacttgagactggccttcaacaaggccaggaagaagctggcacgaatgctgcgtgagtaccaggagctaatgagtgtgaagctggccctggacatcaagatcgccacctaccgaaaactcttgaaggccaaggagtgcaaaatgtttgaagaatgccaaagtgccgtgagcatctctgtggttggaggtagcaccagcactggaggcatcagtggaggattaggaagtggctctgggtttggcctgagtagtggctttggctccggctctggaagtggctttgggtttggtggcagtgtctctggcagttccagtagcaagatca

SEQ ID NO: 48242 - DNA, 362 bp, Gossypium hirsutum
  Clone ID: LIB3196-048-P1-M1-H3
atggaagtgacatcgtctttaaaccctgcgtggcaatccctgacgcaccgccgtgatgcccagggaagacagggcgacctggaagtccaactacttccttaagatcatccaactattggatgattatccgaaatgtttcatcgtgggagcggacaatgtgggctccaagcagatgcagcagatccgcatgtcccttccagggaaggccgtggtgctgatgggcaagaacaccatgatgcgcaaggccatccgagggcacctggaaaacaacccagctctggagaaactgctgcctcatatccgggggaatgtgggctttgtgttcaccaaggaggatctcactgagatcagggacatgttgc

SEQ ID NO: 48243 - DNA, 95 bp, Gossypium hirsutum
  Clone ID: LIB3196-048-P1-M1-H4
cccacgcgtccgacttaacagagtggagaataaaatcttaataatacataattatgtgagtttgagatgtttcggtttcaaaatttgagattaat

SEQ ID NO: 48244 - DNA, 373 bp, Gossypium hirsutum
  Clone ID: LIB3196-048-P1-M1-H5
cccacgcgtccgctctgtagccgccgcctgcgtctctctcttcatctctctgaaccaaaaagtctttagcttttcgcttcgagagagaccatgttggtttaccaggatctcatctccggtgacgagcttctttctgactcattcccctacaaggaaatcgagaatgggatgctgtgggaagttgagggaaagtgggttgtgcaaggagctgtcgatgttgacattggtgccaatccttcagccgaaggtgctgatgaggatgaaggtgttgatgaccaagctgtgaaggttgttgacattgttgacactttcaggcttcaggagcaaccccctttcgacaagaagcagtttgtcgtgttcatcaagaagttca

SEQ ID NO: 48245 - DNA, 360 bp, Gossypium hirsutum
  Clone ID: LIB3196-048-P1-M1-H7
gctatacgctgaatatcacttccgtacaaggatttgaaacctttatgtcaagcttaaagaataaaacatttcgcccaagtaaggaaggtagcggagtggatcttggttttaagttgtgtagacaattaccaaagcagggatggtggtcaaccaggcttgcactgagttgaataaggcatggatggagtctggtgtatctgaggatgcagtttcaggtcatatacagttgctgattccgggagaaactgcttgttttgcatgtgcacctcctttggttgtagcatctggagtggatgaacgaacactcaaccgtgaaggggtttgggcggaatttttgccaactaccatggaagttgttgt

SEQ ID NO: 48246 - DNA, 179 bp, Gossypium hirsutum
  Clone ID: LIB3196-048-P1-M1-H8
aagagatctatgtaggtgaaagaaggcaagaagccttgttgaaagctttgatggattttaagtctttgttttcttttgataatgtttttatgatactggtttcaaggattggattgaactaccattttgtttgctagatattatgtgatattgttatcaattatcttaatttttggttt

SEQ ID NO: 48247 - DNA, 344 bp, Gossypium hirsutum
  Clone ID: LIB3196-048-P1-M1-H9
agatcctgaaactagcaaagaacaagttcccaaggaacttatgaagacaaagagcatgaaatcatctttaaaggggaaggtttcaagtttatttttctcaaagaataagaaaacgaataaagaaaaatatagtggatctcaatctacagatgaatctccatctgtgactcctggaacaccagggtcacccataattcaccctcggaagattagcaatgatgcatctcagtgtgttaatgacagttacatccaagagtgtttgtctcctgttgtaggtggatcagcaagtaaaactcctttaccagatctgattggcataagacagaagctaggcatgatcacta

SEQ ID NO: 48248 - DNA, 378 bp, Gossypium hirsutum
  Clone ID: LIB3196-049-P1-M1-A1
cccacgcgtccggtccacagggtttggtgccactgtgaatgtagctaaacccaaaaagggtcaatccgttgcaatatttggactaggtgctgtcggtcttgctgctgctgaaggagcaagagtttctggggcttccaggatcattggtgtcgatttgaaccctagcagattcgaactagccaagaacttcggtgttacggagtttgtgaatccgaaagatcacaacaaacctgttcaagaggtcattgctgagatgacgggtggaggagtcgaccgcagtgtttgatgtaccgggagcatccaggccatgatttctgcatttgaatgtgtccacgatggttggggaggttcactgcttgtgggggttcccaacaaaga

SEQ ID NO: 48249 - DNA, 382 bp, Gossypium hirsutum
  Clone ID: LIB3196-049-P1-M1-A10
aggatattaaaaattctctccatctttagctttcttcttgttctacggtgagtgactccggtggcttgtttagcaccggagtgggtcaatctttccgtttcctttttgtttcgcttcggtggtatgaagatcaaagaattaagggtgcatcgatatttgtgctggttgggatctagtccgtacgaagtaagtgatatcagatctttgagatctgcggtgtggctctagatccttcttattttgtccgccagatgatgaggaatcgatcatttcctgcctgcatgtccatgtttttttgctgattgctatgtgttcactccatttgtcgatcccctgttaatcaactatctttagactacattggtctgttgtgggtctgatc

SEQ ID NO: 48250 - DNA, 377 bp, Gossypium hirsutum
  Clone ID: LIB3196-049-P1-M1-A11
cctaccttcaccaatgatcaaagactaccaaacctctttttagtaattaaaagtaacataaatttacagttgaaacacaatcctagctttaggatatttttagaatattgcgtaacaaagcttggattgtgctataaatgttattatttgttacttttattattggggaagaaaggtgttggttgtggttggcaacaagtgcaggatgaagaagagaagagagaaaagagtaggaaaatgaaggaagtgaaatattgtcatggcaaaatgctagttggattgccaacaagaatgtcatggaaattctaggaagatgatgcaacattcagtccatgtcactctcagctagctatacttgtactagataaaccaccatg

SEQ ID NO: 48251 - DNA, 380 bp, Gossypium hirsutum
  Clone ID: LIB3196-049-P1-M1-A12
gaaataagcaagaaactttatgttcgacccgtgattggagtccgagccaagctgagaaccaaacactcgggtcatttcggatccacctcgggtgagaaaggtaagttcgggttgacaacgatccagattttaagggttgttaaaaagcttcaggattcggggatgcttgattgtctgcaattgctacacttccatattggatcccaaatcccttcaacagctttgcttcaagctggtgtcgtcgaagctgctcaaatctattccgaattagcccgtcttggtgctgacatgaaagttattgacattggaggcggccttggaatcgattacgacgggtcaaaatccgggaattctgatctctctggttcttatggccttca

SEQ ID NO: 48252 - DNA, 301 bp, Gossypium hirsutum
  Clone ID: LIB3196-049-P1-M1-A2
ctgcaggcatatatccagctcgcacgatctagcaactgccaggtttaacttaccttacataccaattcatacatgaccaatggggtaacttactgccatggcactggacgagtcaagacaacatggcaactgtgaaaaccatgctgttacccaagtatatgcacattgcagtacatacaaaactatacagcctagcgtcagtccctagatgaccagaccagtcgtgcttctgaacagactgacaggctcaatggtgaatggctcgcaatgtgtggaatccaatctagcacagctggaacca

SEQ ID NO: 48253 - DNA, 393 bp, Gossypium hirsutum
  Clone ID: LIB3196-049-P1-M1-A3
gtacactagcaaatcaagaggactcaggaggtggtacaatccaccctggttctctgactctattccatcggttccatatgatccgtttgttctcagacatgcacttgagaatgctgtgatcaaaaggctaatgactgatttcccttttggagttttgctatccggaggccttgattcttcattgattacttctataacggctcggtacttggctgctaccaaggctgccaaacacgggggaaagctccattctttctgtatcggcctagagggttcacccgatttgaaagctgcaagggaggctgcagattatttgggcactgtccatcatgagtttcacttcaccgttcaagatggaattgatgcgattgaagatgttatctaccacattgg

SEQ ID NO: 48254 - DNA, 383 bp, Gossypium hirsutum
  Clone ID: LIB3196-049-P1-M1-A4
gctgaatctcacaatcaaaatccatcgttagttcatcgacgcagcctcgttcagattcaactatagaagcgaaatggctggttccagggttgctcatgctaccttgaaaggaccaagtgttgttaaggagatagttatcggaataacacttggcctttgtgctggtgggctttggaagatgcatcactggaatgagcagaggaaagtgagagcattctacgacatgctcgagaaaggtgaaatcagtgtcattgcagaagaataaatgttcttttagtcttgtgaaagtgtggacagcttcagctgtgtttcgttatatgcattctcttcatttggctcttagatagaagatgagcaaaacacaatttggagcttctaagaat

SEQ ID NO: 48255 - DNA, 386 bp, Gossypium hirsutum
  Clone ID: LIB3196-049-P1-M1-A5
aatcaatccagttatatatatcaaaaaacgtaccatggcaaagttcgctctcctcgtagccactttcgctctcgctttcttcctcgtcaacgcctccatctaccggaccacggacggcgacgaagaaaactggtaccgacacgatcggcgatcgtgtcaagaccagatatggcagcaaggctacctcccaaactgtcagtggtacatgaacgaacaggccggccgcagccacagcggatatggcacccactacctcaactcgtgctgctacgagctccagaacctaaggcaggattgccggtgccaaggcttgaaacaggcgttaggacaacagctgaagctgcaaggagtacggtgggagagtcgagaggcttaaaatatgtgtg

SEQ ID NO: 48256 - DNA, 312 bp, Gossypium hirsutum
  Clone ID: LIB3196-049-P1-M1-A6
gcgaaggcttcgaatatagagaggggggcgtggcgtaattggattaaagcataagaccagagacatatatttatggtgaggtattaatcaatgcttgaagtacttttaccattgcccattgcggtatagagataaagagttgcgacaatatactatagtgcctccacttataggtgttcgggttcttaacaaaatacccgagtctcatgaactcatatttactacgtaggtctagtggtttgagatcccaatgccttttctctcgcggatgcttgcactaactcataaagcattattagccttgccagagtt

SEQ ID NO: 48257 - DNA, 230 bp, Gossypium hirsutum
  Clone ID: LIB3196-049-P1-M1-A7
acgcccacgcgtccgaggacgcgtggggttactaactgcaacattgatatggagagtttaatatctgaccaaaatagaagcattgccacacttgcaatcactacccttcttaagactggaaatgagtctagtgtggatcgtctgatgaagcaaataaccgtattttaatgtctgatattgcatgatgaattcaaaattgttagttggggaagccataaagatctctatgc

SEQ ID NO: 48258 - DNA, 389 bp, Gossypium hirsutum
  Clone ID: LIB3196-049-P1-M1-A9
aggaaacgaaggagccgaatggatttccttcttcaccaatagcgaagccaccaacaccccaatggctggaagtgtctccttcatgcgagcactgccggaggaagtggtggcagcgtcgtatcaggtgtcaagagaagatgcaaggcggattaagttcaacaacaaaaacacctttttcttcactccttcacagtccgagaggagggccgatgcttaaactccagccgatgccaatgcaatcaaaatcagggggatctttgtagggtaacgtaagtaggaagtaataaaaagagttgcagagctatgtccgccatggattttgtttgtgatcgttgaggtactgaaagaatagggtttagaggatgaataataaaaagaaagggtcttac

SEQ ID NO: 48259 - DNA, 376 bp, Gossypium hirsutum
  unsure (1)..(376): unsure at all n locations; Clone ID: LIB3196-049-P1-M1-B1
caaggatcagatcaagcttaaaaagggccaaaactttttcatctgcaattacattggccattgtcaagcaggaatgaaaatagcagtcactgctgcctaatccgagattaggcattgccatatgatatcttcagtttgcttttaagtattaatgtaagattcggtgtcacaaagtctactctagtgttagatttgcttgctttgagtgggtaggtggtgctccaaacactaaatctatactataataatgatggttttaagtggaaatcttttgtgtaatgctttgtggctaaggttttacttgtactcccttttgcaataaaatatataaagatgcttctaccacgtttatttaannnaaaatatttnaatcatt

SEQ ID NO: 48260 - DNA, 382 bp, Gossypium hirsutum
  Clone ID: LIB3196-049-P1-M1-B10
agaatcagtgaaggatcaagaagctacaacagatgaagtagttgccgaagctcctgcagcggaagcagctgccgaagagccaaaggaagcggagcctgcggcggtggcagtcgaggaacctgaagcctcggttgaagttgaaaccaaggaggtggtagaagaaccaaaggctgttactgaggagccagtagtagaggagactcctaaggaaacagtgccagaaccagttgccgaggagatcaaggaaaccactgaacaaaccgttgaaaccaaagaaactacagagtctagtgaggcagcagcagaagcacccaaagaagaagttgagaaggaagaagaagcaaaaccggctgaagtggagaaagttgaaacagaaactgat

SEQ ID NO: 48261 - DNA, 382 bp, Gossypium hirsutum
  Clone ID: LIB3196-049-P1-M1-B11
gtttgcttgcttggtctctgccatggctgctgtgctcagatagatctcgtcactaaccatcaccaggatccaccttgggggcaggctgagcaacctgagccacgtcaccaatcccaatgccaactccagaacttgaatgctcttcagcctaagcaccgggttaggtcagaggctggtgaaactgagttctgggaccaaaatgaggatcaatcccagcgtgctgctgttgctttcctacgtcataagatccagcgcaaaggacttttattgccttcatctaccagtgctcctatgcttttctatgttgaacaaggggagggtattcatggggcggtcttcccaggctgttcggagacatatcaatcacagtcgcatcaaaaca

SEQ ID NO: 48262 - DNA, 381 bp, Gossypium hirsutum
  Clone ID: LIB3196-049-P1-M1-B12
gtcttttctggcagagttgcaactggtttgaaggtcagaatcatgggtccaaactatgtacctggggagaagaaagacttgtatgtaaagagtgtacagagaactgtgatttggatgggaaagaagcaggagacagttgaggacgttccttgtggtaatacagttgccatggttggtttggatcagttcatcaccaagaatgctacattgaccaatgagaaggaagttgatgcccacccaattcgtgccatgaagttttctgtctcccctgttgtccgtgttgctgttcagtgcaaggttgcatcagatcttcccaaacttgttgaagggttgaagcgtttggccaagtctgatcctatggttgtctgtaccattgaagag

SEQ ID NO: 48263 - DNA, 375 bp, Gossypium hirsutum
  Clone ID: LIB3196-049-P1-M1-B2
ccctaaactacctatatactatatgggctcttatcaatacctgggttctgagcttttttctcttccctctctttttaagataaatcactaatcatctattttctgcatgcaacggaccttcagtcatatactccgaaggcgcaaaagaagaagtagccggatgttgataagcagcaattcgtaagacttatcggctgcctgagaaaggatgccaaaccagctatggtttgcactagaaatgatttatcagcgtggaaggatttcccaaagggtctcagggaccttcttcttgatgaagacaccaattctgctgcagagataaaatcaaagcttgaagctatggattatattgtatataccttctgcaatgaaaat

SEQ ID NO: 48264 - DNA, 410 bp, Gossypium hirsutum
  Clone ID: LIB3196-049-P1-M1-B3
ataatgaccgtccttattaagcgtaataccaccattcctaccaagcagacacagaccttcactacctattctgacaaccagcctggtgtgcttattcaggtctatgaaggagagcgtgccatgaccaaggataacaacctgcttggcaagtttgaactcacgggcatacctcctgcaccccgaggtgttcctcagattgaagtcacttttgacattgatgccaatggtatcctgaatgtctctgctgtggacaagagtacaggaaaagagaataagattactatcactaatgacaagggccgtttgagcaaggaagacattgaacgtatggtccaggaagctgagaagtacaaagctgaagatgagaagcagagggacaaggtatcatccaagaattcacttgagtccta

SEQ ID NO: 48265 - DNA, 356 bp, Gossypium hirsutum
  Clone ID: LIB3196-049-P1-M1-B4
gaggtaccgccccgaaattcgggattcggcccacgcgtacgaactgttgtaataccaaacatggggggcacttacaggccttaactacctattgtgacaaccatcctgccgtgctaattaacgtacactaaagcgagcgagccgtgcccatggagaacaccctgcttctcaagagaacactgacggacatacttgctgcacccaccggggaacctcagaaggaagggagctctgacatttatgccaatggaatgctgaacgtatcagctgtggacaacagtacattaaaagagaataagattgctatcactaatgacaagggctcgagtgagcaaggaagacagttgacgtatggt

SEQ ID NO: 48266 - DNA, 403 bp, Gossypium hirsutum
  Clone ID: LIB3196-049-P1-M1-B5
atccactgcactcctgtctgggtgacagagcaagaccctgtctaaaacaaatgggcattttggacaatatattcttgataatggaacctggacagcatttatcaaacacggtagggaaggttctcattctgcattataaaaaggactgccacatatcaactgttagagataggaaataagatggaaaatttttaactgtttattttcttaaagagacttcctgccctgccagagatcttcaatagcccccagtcagtcatccagaagccattcacataattgattatcttggcttccactttgaaagagaaccaccttttgctatacttggctgcattttttgctttaatgtcttctgcagaactaggttcttctggtgtttagacgtattttcctatttttt

SEQ ID NO: 48267 - DNA, 271 bp, Gossypium hirsutum
  Clone ID: LIB3196-049-P1-M1-B7
gcgtcatattatgctagagatggaactgaactgttggatatgaataatacattcaacactttgtacctagggagaagaaagacttgtatgtaaagagagtacagagaactgcgttgtgatatgatatgatcagtgagatagtagatgacaatgcttgagttgatgcaacagacactactgtagtgtaacatttgattgctttaaatgctacattgaccattgagaaagtagatgtttcctatccaaattatgccatgaagtgtactgtatt

SEQ ID NO: 48268 - DNA, 407 bp, Gossypium hirsutum
  Clone ID: LIB3196-049-P1-M1-B8
ataagctcaccacctatgagtacatcgtgcagcaccgcccaccacaggaggccaagggggttcacagggagctcgagtcatgtcctcccaagatgcggcccattcaggagatggagttctacatgcggaccttcagccatgtgcgcccagagccccctggccaggccaggccagcagcagtgaatgccaatccctcccagtttcttgccaccagtggccaagcggaacctccaccaccctcttccccagacactgttgccctgcctccccggatccgaccccagaaaaagaggaagaggcgcgtgtataaagtgcggacgtctgagacctcggatcgggcgtcggggcccagggcccccggccgccgctccagctcgtcgacggattccgcggacgccagccctgtg

SEQ ID NO: 48269 - DNA, 286 bp, Gossypium hirsutum
  Clone ID: LIB3196-049-P1-M1-C1
atgaagagactctgacacggggcgtaatttatacatactggggatttgtgactgacttgatactaattcagtttgtgcagtgatgatgccagtgtcctaactggcttattgccatggttgggcggaatgagtacagtgctcacacattgtatttaatgacatatacaaagcgaatgggaagcgaggtcttgtcatgtggatatcatgtagaatgcatgtgggtgcaccctttgaagagcggagggctcttgtgtctgagagccctctagctgtccacttggtttat

SEQ ID NO: 48270 - DNA, 266 bp, Gossypium hirsutum
  Clone ID: LIB3196-049-P1-M1-C10
cggaaaaaaaaatctctgaaatggcgatgaaaattttcagcgttttcttctttgctctcctcttcctcgcatctcctttccttcaagttgctaggtgtcaatcagaagcagaggcagatgttgcagaagctgttgaaggaggtgatctcggtattgttggggaggatgttcaggattttggtgatcctaattacagttcagctcctgaagttaaaactggttgcgttttccccaaaaatagtgcccaattgggtctggctggggaa

SEQ ID NO: 48271 - DNA, 381 bp, Gossypium hirsutum
  Clone ID: LIB3196-049-P1-M1-C11
taccgaaccccataattcacaattgaagccatacagctatgggctgaagacagctgggctggggagacgatgaccctgatgtcaggagactagaccagtcctagttccagggggaggcctgcagacccctggccccttccaccacctctgccctccatctgcagacctcggctgcaccaggctctacattcactcccccaagtctttggaaatttcctcctttcctttgaagtcacattttccttcaaaattttttgttttgcatccaaaaccaaaagaaataaagctgtgggaggctgtaaaaaaaaatcaaatatgtttaattttaataaaattataatcaatttaaatattctataataataatttgattataaaagg

SEQ ID NO: 48272 - DNA, 396 bp, Gossypium hirsutum
  Clone ID: LIB3196-049-P1-M1-C12
atgttttgactttttttctatttaatactgtgtatttttaaaatctgggtaatattgtatattttttaaaaagtatttttggttattggttgtggcaaactgaatttgctttttaatacttaggaatccacagcttttattgaaatagctcttttaataaaaacgactactgtatcttggcgtacagtgtagtacgcttttaaaaaaacttctaaatattcacagtttttctttaatttcatgattgttttactttctgtgttttaatggtctctgaatgtcagttttatagggatgttcttgccatagagtccatctattccattttcagtctatttgaaatgtgttattaaagtattatttattttaggttttattgattggattgctttcaag

SEQ ID NO: 48273 - DNA, 406 bp, Gossypium hirsutum
  Clone ID: LIB3196-049-P1-M1-C2
atgccatgggcagtattcctctctaataatgaagggtgtcaggtcagttttttagcaccttttgagagtagtaattggattactcaggccaccaacagagatgaatttcaaattgatgaaattttgatacaatatgaagggtcttttaccttcctgcttaatctgtaaaggtatttttttattctctgagcactgcatctttatcatgagtaaagcttagaaataatgaagtactttaacttgtactgtttctttcatggaaaaggaccaaactcttacccaggatctgccggagcagctgttggagcccatgacgcttaccgggatgcgaaagagaagcgttctaaaagccaagatgcagatttacctggaagttctggggcccctgaaaacttgacattcaagg

SEQ ID NO: 48274 - DNA, 384 bp, Gossypium hirsutum
  Clone ID: LIB3196-049-P1-M1-C3
gttttgaaactcacgagaaactgggttttcatttctttaagcttaaaagaaattctgggttgtttttttttggccattttgagtatagaaaaacatggcaaagcttgaaaattcgtcatcaatggcggtttctctcattcaagcatttcaacagacagatggtgtacaatcgaagaagaaaagaaatctccctggaatgccagatcctgaagctgaggtaatatcactatcaccaaaatccttactggccaccaaccgtttcatttgcgagatttgcaacaaaggctttcaacgtgaacaaaaccttcaactccaccgccgaggacataacttaccgtggaagctccggcaaagaaccgacggcaacgaaacaagaaagaaacg

SEQ ID NO: 48275 - DNA, 379 bp, Gossypium hirsutum
  Clone ID: LIB3196-049-P1-M1-C4
cggacgcgtgggccggtgagccgggttcacgtggggattgatcggaaaaccgggatgtgtaggggatttggttacgtcaattttgtgaagaaggaagatgccgaaagagcggtattgaagctaaatggttatggatatgatagtctcatattgagggttgaatgggccgatccaagaaccaattagatattcttcttttttttgagaattataactttatttttaatttaggttttctttttgggatattttaatttttaagtatctagacatattaggttttttttattaataaatttttatgtggaaattaaattccactaatcattaataaaattcaactaatttagtgtaaatttaatccaactattagtaaata

SEQ ID NO: 48276 - DNA, 387 bp, Gossypium hirsutum
  Clone ID: LIB3196-049-P1-M1-C6
tcgtccacgcgtccgggcaagtgagatgtctcttagaatggagagattgttcatgggagaccagcagatgcttcaagaagacttctctagtgatgaaggtgaatctgtcaactctcggagttgtttaatttttgagtattttgaacaagacactccttatagccgggaacccttagccaacaagattgcagatctggccttccaattccctgaactgaagacactaagaagctgtgatttgttgtcttccagctggatttctgtggcatggtatccaatttacagaatacctactgggcctacattaaaagatctagatgcttgctttctgacttatcattatcttcatacacccatagtggacgggcaccggccatgacatgttcc

SEQ ID NO: 48277 - DNA, 375 bp, Gossypium hirsutum
  Clone ID: LIB3196-049-P1-M1-C7
aattaggcaatttacccatttttcaaaaacacgcagatccttcctgggtaatcgggtcaacttccagatcctagtctaaaacgatgtcgttttgaaggccaccgttcaggccaaaacgacaccgtttacatatggctatataagtaaattttttaacctaaaaatcatttggaaacccagtttttttaaaaaaaaaactcaaagaaatcctctgtaggaggattcagggttagccttggagcctcgtcggacctccgttctcaggcacctacacgtgcacgcgccaccgctagggccaccacacacgacggtcggagggttaaaaaccctcgtacttcggagcaaagtggtggtaagctccttccttttaatatt

SEQ ID NO: 48278 - DNA, 382 bp, Gossypium hirsutum
  Clone ID: LIB3196-049-P1-M1-C8
cggacgcgtgggatttattttcttccataccagcataaagcaacaatggcaaagctcgcagtttacttagccaccctggctctcattttgttccttgccaatgcttcaatcacatctgggaacggtcgaaagcggggaaaaccgggatagctgtgaacagcagataaggaagcaggcccacctgaagcactgccagaggtacatggaggaggagtgggttgccgaaggcagcgacaatatagccggcggatacattgactcatgttgccagcacctagagaggatggatccgcattgcagatgtaaaggtctaagacatgcaacgttgcaacagatgcaacagatgcaagaacataaggggagcaaacagatgcgagagatc

SEQ ID NO: 48279 - DNA, 391 bp, Gossypium hirsutum
  Clone ID: LIB3196-049-P1-M1-C9
atggccaagcaagcttctgtctgcacctgctctcaatcctgctctcaccatgagcctccgcctgcagagctcctccgccagctatggaggtggttttgggggtggctcttgccagctgggaggaggccgcggtgtctctagctgttcaactcggtttgtctctgggggatcagctggaggctacggaggcggcgtgacctgtggctttggtggaggggctggtagtggctttggaggtggctacggaggtggccttggaggtggctttggtgggggttatgctggtggctttgttgattttggtgcttgtgatggtggcctcctcactggcaatgagaagatcaccatgcataacctcaacgaccgcctggctttctacctggagaaggtg

SEQ ID NO: 48280 - DNA, 349 bp, Gossypium hirsutum
  Clone ID: LIB3196-049-P1-M1-D1
atgcgaccgccgacatattagggaccgcggagcccgggagcccgtcagcggcggctgcggccgggcttgcgggagctgcgggggccggaggcgggcgctgtgcggtgccggtagaggcggtgtcggcgggagccagcgagcgacgggagcgagccaggctaaccttgccgcaggccgagccctgcctcgccatggaccaggactatgagcggcgcctgctccgccagatcgtcatccagaatgagaacacgatgccacgcgtcacggagatgcggcggaccctgacgcctgccagctcccccgtgtccttgcccagcaagcacggagaccgcttcattcccctctagag

SEQ ID NO: 48281 - DNA, 379 bp, Gossypium hirsutum
  Clone ID: LIB3196-049-P1-M1-D10
cccacgcgtccgcgatgtttcaatacaatttcaattttataactttttgctcattttggttggtttctgacatgtttcattcaggttaattatacgtaaagggtagaaagatgagtcgcaggaatgctccgaagcttgagttgaagctgaacctatcgccaccaagggcaagggttaatccaggagtggaatcaccaagccgatcagctaccatatcaccgacatctcctccaagctcatgcgtgtcgtcagagatgaaccaggacgttgatgctgctaacgtcagatactcaagcagccctgaggcgacatccatggttcttgtagggtgccccaggtgcttgatgtacgttatgctttcagaggatgatcctaaatg

SEQ ID NO: 48282 - DNA, 398 bp, Gossypium hirsutum
  Clone ID: LIB3196-049-P1-M1-D11
atgctttattgcgggtggatgtgccacgttcctgtgtcagcccctggatgtgctgaagacccgtctgatgaactccaagggggagtatcagggcgttttccactgcgccgtggagacagcgaagctcgggcctctggccttttacaagggcctcgtcccagctggcatccgcctcatcccccacaccgtgctcacttttgtgtttctggaacagctacgcaaaaactttggcatcaaagtgccatcctgaccggccgtgggaatggctgggctgccaggccggctgcgctaagttcttccaaagagtcccaagcccagcacctgcttctggggccacaacctcgctggccatggccacccgtcctccccagcaggcccctgctgtccccccacctgct

SEQ ID NO: 48283 - DNA, 382 bp, Gossypium hirsutum
  Clone ID: LIB3196-049-P1-M1-D2
ctcaaggggagaaaatgggagaaggaaattctttaaaatttcttttccttgaccgtgagaagggaaatcggtggtgaaaggaaggggaaaacttcatgttttcttctataatatatttttctttgtctgtacttttcttttcttttgctggtccgaatggatgaaacaaaaagggaggtcacttgcatggagggagaggccatggatttggcatattaaatagttgtttcttcatattaagaagcttgagaggtgggagacggtcaaattggtaaaggcgaggagaaagtttgtgctcttaacataaatttggggaagaattcgatttgacaaaatcatcaacaaggaaatcccagctaccgtggtgtatgaagatgataag

SEQ ID NO: 48284 - DNA, 381 bp, Gossypium hirsutum
  Clone ID: LIB3196-049-P1-M1-D3
cccacgcgtccgcggacgcgtgggctggggcagagccttttaaacacttcctccatcaatataatccatatcccatgcaatatgtcatgtatgcagaatgtcatgcccatatttgaatcaaacaatcacagtcaaggcattcatatcaccaacatatgttcataatcaaatccgtcaaccatacactctaagtcagtcacttgcccacaagggcaaaacagtcatttttcatattataaaggtattttcgtaattttgccaaatatcagggttttccatgttcattacaattatcaatattttcgagtgtttaaataatgatctttaacccactttatcaaatttaggcttttgggcccaaaacccctaatgggccttacg

SEQ ID NO: 48285 - DNA, 391 bp, Gossypium hirsutum
  Clone ID: LIB3196-049-P1-M1-D4
atctttgtttgaagaaagggatgaagtatttttctcttttccatattttcctggtgtccttttcaaagggttgtgtcttagcaggtgtgagagcctgcactccttcctgaacagcccttactctgtgcccaagtcaacccaccggtgctttacaacagataatgatgataggaatagcttgtgagattgcccaggggctctgaacttgtgactgcctttcctgaagatgttattttcatggaaaaacatgcttgcttctttattacagggatgttttctttggagaaattgtatgaggaaaggcaggatttcctagggccgatgaagcaacttgctaaagtggaaggagaagacaggaagtcatgaaaagggagctaaagagttaaataaa

SEQ ID NO: 48286 - DNA, 384 bp, Gossypium hirsutum
  Clone ID: LIB3196-049-P1-M1-D5
attaaatatattttaattgaaatatatgatttaataaaatttaaaataattataactaataaattatcttatatgaatttgtataatttaaaataattattattacatataatttaataataatatataatttcataaaattattgataataatttttcttatatgaatttatacaatttaaaataattaatattaaatataatttaataatgatatataatttcataaaattcttaataataaaatgttcttatatgaatttactaaaatcaaaatataacttgagaattatattatgcataaacataattaacttatattaagaaaatgttagatgaaaatgaaattctacatcataatccatatgttatatagttttacaa

SEQ ID NO: 48287 - DNA, 398 bp, Gossypium hirsutum
  Clone ID: LIB3196-049-P1-M1-D6
atcggctgtatgctgtgggcggctatgacgggacctcagacctggctaccgtggagtcctacgatcccgtgactaacacgtggcagccggaggtgtccatgggcacgaggcgaagctgcctgggtgtggccgccttgcacggactcctgtactcggctggcggctatgacggggcctcctgcctgaacagtgccgaacgctacgaccccctgactggaacgtggacatccgtcgctgccatgagcacccggaggcgctatgtgcgagtggccacgcttgatgggaacctgtatgccgtgggcggctacgacagctcctcacacctggccactgtggagaagtatgagccccaggtgaacgcttggtcgtccgtggcgtccatgctaagccgacgcagc

SEQ ID NO: 48288 - DNA, 384 bp, Gossypium hirsutum
  Clone ID: LIB3196-049-P1-M1-D7
atgttttctggaaagaacacaatcacccccaggtgtgaactacttctctaggggacaattgaagcttagcatctttcacttttctacctactgacccaaagtccttttaccatacgtcgttaccttgctaattattttttcacacatatcttatttactagtttgttaattgcttaaaagtaaagattacatcctatctgttcattgatcagtgattcaacaaatacttagtgagtgccaaggaatgcattagactcaaagatgataacacaggtagctaaaagctgtgcgtgcaaaatcctctcaatccttgatacattccttggaggtaggttctggggttagccccatattacagataaggcaactgaggtcagagaaatt

SEQ ID NO: 48289 - DNA, 378 bp, Gossypium hirsutum
  Clone ID: LIB3196-049-P1-M1-D9
atttgaatgaactttgttcaaagagtgatttttctcctctctaaattcgtatgagtttcgatctgacttatctagcgtgctagtggcgtctatcgttctcttttgaacttatcaccttgctttggtgtggcgttcaaccttctacaattccgcaatcccaccttgaaccgaatagaaatcggggtgacacttttagtgttgaatcgtttctggtgtttaagctcatttatccattccaccgactatcctagattttacccaactataatatctttttacaaaaccgagccatcatttatcaacttccatttttcttatttttatacttaaatcgagcctactacccttatgaaattaccatcaccttagccaaccttt

SEQ ID NO: 48290 - DNA, 352 bp, Gossypium hirsutum
  Clone ID: LIB3196-049-P1-M1-E1
cccacgcgtccgatctattaattatttcatgctcacttttattattgctttgagtgcgtcagtattgaactgttattctagaacttgcttgattatgcatgtcgagaccacaccatttgatttgatatgtcaaaatgattaaggcacttacgattaacccactcatgccatgcaaagactacctccatgattaacccctagttaagaccattgagcgtgacaagccatttctttgcttaccctccactttaactcacaacccaccactgttgaaatcccctacactaaacttgaccctatttttggcgagaattaaattgagttaaatgcttagctatggcctggttggcat

SEQ ID NO: 48291 - DNA, 398 bp, Gossypium hirsutum
  unsure (1)..(398): unsure at all n locations; Clone ID: LIB3196-049-P1-M1-E10
atctctccactcagccaactgctcgctcgctcacctccctccttggcaccatgaccacctgcagccgccagttcacctcctccagctccatgaagggctcctgcggcatcgggggcggcatcgggggcggctccagccgcatctcctccgtcttggccggagggtcctgccgcgcccccagcacctacggcgggggcctgtctgtctcctcctcccgcttctcctctgggggagcctatgggctggggggcggctatggcggtggcttcagcagcagcagcagctttggtagtggcttcgggggaggatatggtggtggcttgggtagtggcttgggtggtggctttggtggtggctttgctggtggtgatgggcttntggtgggcagtgagaaggtg

SEQ ID NO: 48292 - DNA, 383 bp, Gossypium hirsutum
  Clone ID: LIB3196-049-P1-M1-E11
aaaccaaataaaataggttctaaaatggattttaattaagtataaatacaaattcaaccttcaattttatatttttttaactaaatttgataattaatattttaaaatagttaaattgtttttaacagaaatttaattaaaacagtggcaaccctcaatgtaattcatgtgtactctatactaacatgccaatatttgttttatatgtcatgtcatcaaatatttaaaaattataaaaaaattttaaaaatttaaaattcaaaaaaaattagcatgaagtatacgcgaattgtcaaatgagttgtcaataacatgataaacaaatgatgtgcatttaatatgatgtatttacatatttaaatctctttttattcatattttaa

SEQ ID NO: 48293 - DNA, 381 bp, Gossypium hirsutum
  Clone ID: LIB3196-049-P1-M1-E12
aggcctaggtgtgcggactatgaattagacgtatgtaacaatggactaatttgcaatcttttgattggtgcaatatggcatcacattactttatcaattttttatgattatttttttctattgagtgaaacttgcaatcttttttaaaggtatgttagttatacacaatcaacaacgaattctttccaaaattcaaaaggaactaaaagggaatagatttggaaatcgattttggaaggtgttgcactagtttcatgtatgatagacttgcatagcatcaagacttttaatgtagatacatgattcaaaaatgattacctaatgaactacaaagaacaatggaaaaaatttacctcatgcaaacatgaaagcttaaaacct

SEQ ID NO: 48294 - DNA, 389 bp, Gossypium hirsutum
  Clone ID: LIB3196-049-P1-M1-E2
atgggcagttggacgttggagtctgaaggacaaaagcaacgtattggcttgagctggggaggggacagccgttggtatagaggcagaaaccgaagctgggagggaacggattcatcccgcacttgtatttagggtaggagaggagacagcccagggtgggcagagggtacgcctgcttggatgtgggcctgtggcatgggagtagcagaggaatagaagcctcaatggccaccttcccacccccttacttcctcctactgcccctccctgccctactcatgctcctttccctgccatcctacccttgggactccctgagcctcccttgggctgtcagatcacccccaggttcaatgtgttagaacatacaaagcactgcagccagatga

SEQ ID NO: 48295 - DNA, 358 bp, Gossypium hirsutum
  Clone ID: LIB3196-049-P1-M1-E3
aacaatgaaggggttactcctgattctgctcataataaactcctgagcaaaacccattgaagagaaaagagattttggtttcggtttttcttagcagtgttttttaacaaacaatagaaaaaaaaaacgataggcaaaggaatgaaagagagaaaccggtttatgtaaaggatgctatgttcatgaatattttgagtactgacagagaaagtaacaaataaacggagagtggtaagggagcgcgtgtggcgcgtggaatctcttttttttttcttcttctctctttcaatttcttaaccaaaagcaaacaattgatatccgaaatactacaatcttaacatcgaaaggcagagattcg

SEQ ID NO: 48296 - DNA, 384 bp, Gossypium hirsutum
  Clone ID: LIB3196-049-P1-M1-E4
gttcacagtccttgcttctaaaagaaggcatcactcaaaccggatctccgatctgcacagatgaaagtttggaggagcaattggatgacccctttgagccagaggagccagaggagaggtgggagtcctccgaaggtttcgatgttctcgtggataacaaatcagaggatttggattatgggaatgattcggaatatcagaaggaccctgaagaggagcagacagattacttctttagttatgattatgaagattcagttcagcatgagaccaggtacccggatttagaattttcgtatgatcgagatgcgtatgatgcttatgagggttcagacaatgagtatattttcaataatccgaggaatccttttgcccaccccggag

SEQ ID NO: 48297 - DNA, 404 bp, Gossypium hirsutum
  Clone ID: LIB3196-049-P1-M1-E5
atgccaggctggtctcgacctcctgacttcaggtgatccacccgcctcagcctcccagagtgctgggattgcagatttgagccactgcgcctggccagggcaggcccctttaagtgtgcatgagcaggtgcggggtgttgtgttcttcagggaactggggttcaaccctggaggcagcaggcatgcatgcacgttgcacacacaagtggtggggcgcgagggctgagggaagcgggctgccaggccgtcagaggctcctggtgaccgtttgtggcccgtttttctgggtctctcccaagagtgctcatggcccaacatggctcgggtcccccatgcccaagggcagcacagaaccagagagggaacctggcagccacagggggtgggagaggcaggatagtggt

SEQ ID NO: 48298 - DNA, 386 bp, Gossypium hirsutum
  Clone ID: LIB3196-049-P1-M1-E6
gaagaagaagagaaggaaagtagcaaggaggagaaaatcgttacggccacaaagaaaggggtggctgttctggatcaagggatcccagatgacataaaggctcattatcatgttctacaaaagggtgatgatatctatgatgccatgttaaatcagacgaatgttgggcaaaacaataacaaattctttgtgatccagcttctagaatctgatgactcgaagacatacatggttcataacagatggggtagagttggtgtgaagggtcaaattaagttacatggcccctttacttcacgacaagccgcaattgatgagtttcaaaccaaattctttaacaagaccaaaaactattggtacaacagaaaagactttgtttgtcaccc

SEQ ID NO: 48299 - DNA, 369 bp, Gossypium hirsutum
  Clone ID: LIB3196-049-P1-M1-E9
caaggtttaatcagtattatagattgttcatccagagatctaagcttattagcttaagctataaaaatggtgaaaagatcgttgggctttttctttcttctcctcattgtcttagcctcgcaatggggggtgcagccaactgaggcaagggtttgccagtcacagagccataagttccacggtgcatgtttgagtagccacaactgtgcgatggtgtgcaggaacgaaggtttctccggcggcagatgtcgaggattccgtcgccgctgcttctgcactaagctttgctaatgcaagcttgcccttagctcatattttaaggatcatttcatgagtaaaagacctttatgtttttcgtgcatgcatgtc

SEQ ID NO: 48300 - DNA, 374 bp, Gossypium hirsutum
  Clone ID: LIB3196-049-P1-M1-F1
cagactagaatatctgatacccaagaagacatcgctgaggcatcgattgcctatgggggaccaggggtttatcgattttattgctcatttgcttgaagtaaacccaaaaaagcgcccttctgcatcagaggctctgaagcatccatggctatcatacccatatgaaccgatatcagcttgagttgcatgcagatttgcttgactcttattgactggggaaggaggtgtattttattactggctcggagttggttttgatctatttgaagtcatcactgtcaccccccttcacatgcctgcaaaatgcaattgaaaggtgtgtttgattttggttgggtataaatatttatggttttaattcctttcccccgata

SEQ ID NO: 48301 - DNA, 397 bp, Gossypium hirsutum
  Clone ID: LIB3196-049-P1-M1-F10
atgcaaggcctcctgcaattgttcaaacagcatttattaaattcgcagtacacaccgagtagcgttatgtagagaggagtcagattatctacttagattcggcatctacttagatttagcatatactagctgagaaattgtaggcatgtttgatacacatttgattccaaatctttttcttctggatctgctttttattttacaaaaatctttttcatacaaatggtttaaaagtaacaaaatctataacaacaactttggatttttatgtataaactttgcgatttaaatttactgaatttaattagggtgaaaattttgaaagtggtattctcacatgactaagttcagtaaaaccctggattgaaagtgagaattatgttcctagaacaaaatg

SEQ ID NO: 48302 - DNA, 382 bp, Gossypium hirsutum
  Clone ID: LIB3196-049-P1-M1-F11
tctcgaccaacacaaacatttggttttggttttgatttcgattttgattatatttcactttattccctgttaacttgttgttcgttcctctcagagcaatcaattgtccatcacaagaatctctctcactctttcttttccgattcaagactcggacaacccaatgaacgatctcgagcgagtcaagaaggaagacccgtttctcgtcaagtatcagccctccgaactcagaatcgcctctgagttcttaaccacgtggcttcctttcctttccagggatctctgccgtcgatgcactcaaatcctctcccgacgaatccgctctctagacccaggagatgctgagctggccaacaatgatctgaatgcaatccattctacc

SEQ ID NO: 48303 - DNA, 380 bp, Gossypium hirsutum
  Clone ID: LIB3196-049-P1-M1-F12
cggacgcgtggggccgccgcctgcgtctctctcttcatctctctgaacctaaaagtctttagcttttcgcttcgagagagaccatgttggtttaccaggatctcatctccggtgacgagcttctttctgactcattcccctacaaggaaatcgagaatgggatgctgtgggaagttgagggaaagtgggttgtgcaaggagctattgatgttgacattggtgccaatccttcagccgaagatgctgatgaggatgaaggtgttgatgaccaatctgtgaaggttgttgacattgttgacactttcaggcttcaggagcaaccccctttcgacaagaagcaagttgtcgtgttcatgaagaagttcatcaagaacttgaca

SEQ ID NO: 48304 - DNA, 376 bp, Gossypium hirsutum
  Clone ID: LIB3196-049-P1-M1-F2
ctcaaagtgcaggaacgccagaaccgtgtttgcacaactgtggctattgcaattgttgctgaaacatgttcaccttttacagttttgccagcattgatgaatgagtaccgcgtgctagaacttaatgtgcagaatggggtcttgaagtctctttccttcctttttgagtatattggtgaaatgggaaaggattacatctatgctgtgactccattacttgaggatgctcttatggatagagatttggttcacaggcaaactgcagcttcagctgtcaagcacatggctttgggtgttgctgggttaggttgtgaggatgctttagtccacttgatgaactatgtctggcccaacatatttgagacttcacctcacg

SEQ ID NO: 48305 - DNA, 387 bp, Gossypium hirsutum
  Clone ID: LIB3196-049-P1-M1-F4
cccacgcgttcgcggacgcgtggggtcgccatttggagttagctgccatcttggtgcaaaaggatcctattcgtgcagcagcttgggatccgataagcactcgtcttgttctttgcactggcagctctcatttgtatatgtggaccccttccggtgcgtactgtgtaagtaatccgctaccacagttttctataactgatttgaaatggaattcagatgggagctgtcttcttctcaaagacaaggaatcattctgctgtgcagctgtgcctctactgccagaatcaagtgactattgctcagatgagtgaaacaaatttctcttgtaatttgtcttgctgctatctagagaaacagaaatataaataggcattctttagttttttt

SEQ ID NO: 48306 - DNA, 377 bp, Gossypium hirsutum
  Clone ID: LIB3196-049-P1-M1-F5
cagaaagagaaccttgggtgttttcttccgcttgagttatctccatttgtccctgcaatttgaggtaagccaaagccagcctctttgcttctcttctttacgagtattaatactttttattaaattagaaatcggtcgttccttttttccccgaaaagtctgatctttggaatgaactcatcagccgttctcagaaggcaaaaactcttaaagctcataaaaaatctacatatctttcatccctggtgcccaaaacacaaaacccaccaaaacccatgtgctcaaatacaaaaaccttcaagggtttttggggtttcccaatattcaactcaatccaccaagttccccgagtaccagatgccctctgtcacttgggg

SEQ ID NO: 48307 - DNA, 384 bp, Gossypium hirsutum
  Clone ID: LIB3196-049-P1-M1-F6
atcccaaatgaacagagttaggaacggtgaactttaccgttacatttgtgacacaaagggtgccttcgtacaacccgcattatatgaagcctttgggttgactgtcgttgaggccatgacttgtggtttgccgacattcgcaacttgcaatggtggacctgccgagattattgttcacggtaaatccggcttcaacattgatccttaccacggcgaccaagctgctgagatccttgtcgacttcttcgagaaatgcaagacagactcatcttactggaccaaaatctctgagggaggtttgaaacgtatcgaagagaagtacacatggaaaatttactctgagagactattaaccttgaccggtgtctacgggttctggaagca

SEQ ID NO: 48308 - DNA, 324 bp, Gossypium hirsutum
  Clone ID: LIB3196-049-P1-M1-F7
cccacgcgtccggcaacataagcaagaactggagactgccaagagcagctcatctgttgagaagaactatgagttgcctgacggacaagtcattactattggagctgagagattccgttgcccggaagtcctcttccagccatctttcatcgggatggaagctgctggaatccatgaaactacctacaactctatcatgaagtgcgatgtggatatcaggaaggatctctacggtaacattgtgctcagtgggggttcaaccatgttccctggtattgcagaccgcatgagcaaggagatcactgctcttgctccaagcagcat

SEQ ID NO: 48309 - DNA, 361 bp, Gossypium hirsutum
  Clone ID: LIB3196-049-P1-M1-F8
atgctggggtgagggtagacgtgggggggctgggggggttactggggtgggcttttaatttcctcccctcgctggtttctatgagtctttcagacaagaccttaaatgatttctgtctgctctgagcggacgttaaaatgggcccccgtcccctatccacaccctccttcctcagggcacttactaagggaggggtctccctctccatctacccaatggcctacctgcctccaaccctgcctgccgccccctgcccaccccacatctactggccactgaaacacaaacctatttatttctaggcctgtagaaaggaaatcggactggggttcccggttaagcaccaagatggctcctgggc

SEQ ID NO: 48310 - DNA, 367 bp, Gossypium hirsutum
  Clone ID: LIB3196-049-P1-M1-F9
cccacgcgtccggaaaaagctttctctttcacgaaacgtaatatgctccaagtgcaagggcaaagggtctaaatcaggtgcatcaatgaaatgtaccggttgtcaaggttcaggaatgaaagtctccattcggcacctcggtccttccatgatccaacaaatgcagcatccttgcaatgagtgcaagggtactggtgaaaccatcaacgataaggatcgttgcccacaatgcaaaggtgataaggttgtgcaagagaagaaagtcttggaggttattgttgagaagggtatgcagaatggacaaaggattactttcccaggagaagctgatgaagcgcccgatacggttactggggacattgtattc

SEQ ID NO: 48311 - DNA, 400 bp, Gossypium hirsutum
  Clone ID: LIB3196-049-P1-M1-G1
atgtccagagcagagtcagccagcatgaccgagcgccgcgtccccttctcgctcctgcggggccccagctgggatcccttccgcgactggtacccgcacagccgcctcttcgaccaggccttcgggctgccccggctgcccgaggagtggtcgcagtggttgggcggcagcagctggccaggctacgtgcgccccctgccccccgccgcgatcgagagccccgcggtggccgcgcccgcctacagccgcgcgctcagccggcagctcagcagcggggtctcggagatccggcacacggcggaccgctggcgcgtgtccctggatgtcaaccacttcgccccggacgagctaacggttaagaccaaggatggcgtggtggagatcaccggtgagtccccct

SEQ ID NO: 48312 - DNA, 384 bp, Gossypium hirsutum
  Clone ID: LIB3196-049-P1-M1-G10
cccacgcgtccgcccattcactgagtctcaacaccgagtcatcatcactcatggctatcgaggcttggtttatggatgaaagcaaagaagaccaaaggcttcctcatcgacgcaaccccaacgaacctgtttcgttggagcacttggcagagctgggagtgttgtattggcatttgaaccccaaggattacgagaacgatgaagagttgaagaagattagagaagccagaggttataattacatggatttgcttgatttatgccctgagaaagttgacaactatgaggagaaactgaggaacttttacaccgagcacatccatgctgacgaagagatacgctactgcctggaaggcagtgggtattttgatgttagggacaagg

SEQ ID NO: 48313 - DNA, 381 bp, Gossypium hirsutum
  Clone ID: LIB3196-049-P1-M1-G11
gagtgtcaaatcaataggctccgcgcctctgcaccccagacccgaattcgctccgaagccggcaccaccgagtggtggaaccccaactgtcaacagctcaggtgtgctggtgtatctgtaatgaggcagactattgaacctaatggccttgttttgccttccttcaccaatgctcctcagcttctctacattgtccaaggaagaggtattcaaggtattgtgatgcctggatgtgccgaaacattccaggattcacagcaatggcagcatcaaagccgtggcaggttccaggaccagcaccagaaagtccgacggttccgccagggtgacatcattgctttgccgcagggtgtggttcactggagctacaatgatggcaat

SEQ ID NO: 48314 - DNA, 388 bp, Gossypium hirsutum
  Clone ID: LIB3196-049-P1-M1-G12
atcctccagctccatgaagggctcctgcggcatcgggggcagcatcgggggcggctccagccgcatctcccccgtcctggccggagggtcctgccgcgcccccagcacctacggcgggggcctgtctgtctcctcctcccgcttctcctctgggggagcctgcgggctggggggcggctatggcggtggcttcagcagcagcagcagctttggtagtggcttcgggggaggatatgggggtggcttccgtgctggcttgggtggtggcttgggtggtggcttgggtggaggctttgctggtggtgatgggcttctggtcggcagtgagaaagtgaccatgcagaacctcaacgaccgcctggcctgctacctggacaaggtgcgtgct

SEQ ID NO: 48315 - DNA, 340 bp, Gossypium hirsutum
  Clone ID: LIB3196-049-P1-M1-G2
cggacgcgtgggctcggctactaattaactaatcaattagttgatacttgcttatctcccgacttcgtcttgcctatgataacttcctagggttgtcaagtctagtggtttaaggatatgtaatttgtaccaactaatccctcttcggaaaacctaaatactctgttaattacaacctcatgcactcgttaatctcccctaggggatttagccactcatgttattcataatatctttattaattgaataaacaatgtaaagaacatgacgagaagaaaagagatttgaataattgtggatttaatatcgaatggggaatagagtagtaaatctattggtt

SEQ ID NO: 48316 - DNA, 331 bp, Gossypium hirsutum
  Clone ID: LIB3196-049-P1-M1-G3
atctgggggtcacaccgacaaatctgaagcgggtttgccagaggagtgtacccgtctccctggcctgggccaccgggtccacagggatcccatttccggccctacaccccgctccacgatcccatacgggcgctgcagctgtgttctgcaggctgcagggacgcgctgagacgaatccccggacgaggtgatggctgggccggcggaggaggcgggagcccattgtcccgagggcctgtggcctctgcccccgcaggtgtcaccaagagtgacctacacacgagtgagcccaggacgggctgaggatgtcaccttcctctaccacccctgt

SEQ ID NO: 48317 - DNA, 375 bp, Gossypium hirsutum
  Clone ID: LIB3196-049-P1-M1-G4
ttttaatccgagaccatatttcagattatttatcaactggctgttagatcttggttccttggaccctgtcactgatggtgcaaattttcagattttgacggccttcgccaacacatttcatgttctccagccccttaaagttccttccttctgctttgcatggctagagcttgtcagtcataggactttcatgccaaaattgctcactgggaattctcagaagggttggccctatatccaacgtttgctggtggacttgcttcagttcctggagccgtttttgaggaatgctgagcttggagttccggttcattttctgtataaaggcacactaagggtgctgctggttctgcttcatgactttccggagttcct

SEQ ID NO: 48318 - DNA, 387 bp, Gossypium hirsutum
  Clone ID: LIB3196-049-P1-M1-G5
gtcttgaccttgcaggtcgtgatctaaccgatgccttgatgaagattcttaccgagagaggttacatgttcaccaccactgctgaacgggaaattgtccgtgacatgaaggagaagcttgcttatgttgccctggactatgagcaggaactggagactgcgaagagcagctcatctgttgagaagaactatgagttgcctgacggacaagtcattactattggagctgagagattccgttgcccggaagtcctcttccagccatctttcatcgggatggaagctgctggaatccatgaaactacctacaactctatcatgaagtgtgatgtggatatcaggaaggatctctacggtaacattgtgctcagtgggggttcaaccatgt

SEQ ID NO: 48319 - DNA, 405 bp, Gossypium hirsutum
  Clone ID: LIB3196-049-P1-M1-G6
atatcgaggacctgaggaacaagatcattgcagccaccattgagaatgcgcagcccattttgcagattgacaatgccaggctggcagccgatgacttcaggacaaagtacgagcacgaactggccctgcggcagaccgtggaggccgatgtcaatggcctgcgccgggtgttggatgagctgaccctggccaggactgacctggagatgcagatcgaaggcctgaaggaggagctggcctacctgaggaagaaccatgaggaggagatgcttgctcttcgaggtcagagcggtggagatgtgaacgtggagatggatgctgcacctggcgtggacctgagccgcatcctgaatgagatgcgtgaccagtatgagcagatggcagagaaaaaccgcagagatgctg

SEQ ID NO: 48320 - DNA, 385 bp, Gossypium hirsutum
  Clone ID: LIB3196-049-P1-M1-G7
atctccggaacctcaagaacaaactggagaataaaatggaaggaataggtttgaagaggacaccgatgggcattgtcctggatgccctagaacagcaggaggaaggcatcaacagactgactgactatatcagcaaagtgaaggaataaacataacttacctgagatagggttacagcagaaattgagttgcagtttgcccttgtccagacctactttctacttgtgtttttgaaataggaggtgcacgtaccacccaattatctatggcagcatgcatgtataggctgaactattatcagctctgatgtttcagagagaaggcctcagaaactgaaagaaaaccaccaccctcctattgtatctgaagtttcacgtgtgtttat

SEQ ID NO: 48321 - DNA, 348 bp, Gossypium hirsutum
  Clone ID: LIB3196-049-P1-M1-G8
ccaatctttcattctttgctgttgaagtagtaatatctatagcatacagagatggagaggcaaagaagcaagcaggtttgtttgttgatgtgggttttggttgctgcctttttctcccacaatagggtcattgcagcgaccttcactggccttggcgagcagaaaaactactatccaggtcctgaccctcatgctggaactaccccttcaggttcacatggcacaccaccatcttcaggaggtggatcacctgcctgtcatggtaccccgtcacatggaggtggttaccaccctataccaacaccatcaacgccttcaggtggaaattgaggaacttctcgacatgac

SEQ ID NO: 48322 - DNA, 380 bp, Gossypium hirsutum
  Clone ID: LIB3196-049-P1-M1-G9
ctctcccatgcatcatagagggtctctaaatccatctgtacaaaggaagagatatcattcctcaacttagctgtcttagccgatgggaagtacctcaataggaatttatcagtaatttgatcccatgtagtgataaaacctcgtggtaagtaattcaaccactatttagctttattcctcaacgagaaaggaaacaaccgtaggtgaatgacatcgtcagaaatgccatttatcttgaaagtatcatagacttctagaaaattagccaaatgagtatttggatcttcgtcttgtaaaccatctaactaaacaaattgttgaatcatctgaatagtgttcggcttcaattcgaagttattcacagcaataataagtctcac

SEQ ID NO: 48323 - DNA, 363 bp, Gossypium hirsutum
  unsure (1)..(363): unsure at all n locations; Clone ID: LIB3196-049-P1-M1-H1
atgcgcatgcagcacctgattgcccgtgaggcagaggccggcatctaccacttgcaattatttgaggaactccgccgcctggcgcccattaccagcgaccccacagaagccaccgccgtgggtgccgtggaggcctccttcaagtgctgcagtggggccataatcgtcctcaccaagtctggcaggtctgctcatcaggtggccagataccgcccacgtgcccccatcattgctgtgacccggaatccccagacagctcgtcaggcccacctgtaccgtggcatcttccctgtgctgtgcaaggacccagtccaggaggcctgggctgaggacgtggacctncgggtgaactttgccatgaat

SEQ ID NO: 48324 - DNA, 379 bp, Gossypium hirsutum
  Clone ID: LIB3196-049-P1-M1-H10
cggacgcgtgggtgataactgtaaaccagataggtttacatacaatattctcattcatggtgtttgtaaagccggtgtcatcgatgaggcagttcggttagttaagcagatggaaattttcggatactcaccgaatatgtgtacttataccatcttaattgatgggtactgtaatgccaggagggtcgatgatgcgtttaaacttattgagacgatgaagaaaaggaatgtgtttcctaatgaagctaccgtgagatcgttgattcatggggttttccgttgtgtggctccacgaaaggcattcgagttgttgataatgttcttggagaaggagcctatgatgcagagattggcttgtgatactctactgctttgtctt

SEQ ID NO: 48325 - DNA, 383 bp, Gossypium hirsutum
  Clone ID: LIB3196-049-P1-M1-H11
cgaaatggtctgccctcacctttctaggcagagctcacactggtcctcccgagaggaagaagaacaagaagaacaagaagttgaaaggagaagtggacaatacaagagagtgagagcccagttatcaaccggtgacctatttgtagtcccagcaggccatccagtcacattcgttgcctcccaaaacgaggacctaggattgctcgggttcggactctacaacggccaagacaacaagaggatcttcgtggctgggaaaaccaacaatgtgagacaatgggatcgccaggccaaggagctggcgtttggggtggagtcaaggttggtggatgaggtattcaacaacaacccgcaagaatcttacttcgtgtctggacagagtc

SEQ ID NO: 48326 - DNA, 394 bp, Gossypium hirsutum
  Clone ID: LIB3196-049-P1-M1-H12
atgaaagtggcattcattaggaaatgaaaactgctgtctctggcatcctgtagtttatggagggtggaagatgaagccaatctctacttgagaaggctaccaaggagagaaacattgtccccaggggaaagctagattttagacaaggcaaagagcaggaaggggtggttgaagagattgagaatgacattccagaaaggacaatagaaagtcttgggaaggagggagagaggggaagagagaaaggatagctggtcacatagagtatctatagggataaaagtatagctaaaagaacctacattttaggtggaggtaatacagctgcctaagcttaagtgaactgctttttgaatcttagtttgctccttcataaaattggattaatataata

SEQ ID NO: 48327 - DNA, 402 bp, Gossypium hirsutum
  Clone ID: LIB3196-049-P1-M1-H2
atttgcctttatgacaagcatatgttttgacattcaggaggagtagtgtgtgatgtgagatttgaaattcatttcctttttgttaaaatattaataaaactgttaacatgtttgctttttctgaataaatttgacctttaataaaacacttaaaactctacagatccatttgaacgtctactaaaatgtcactttaatatttgaagttgctatctcattactatttttccttctatttaaagatggccttcgccggattttatgtcaggttggtttgcaggaagggccagatggtgaaaactcttctctagtggacagactgatgcttagtgattccaaattatggaaaggtgaatcttttaactacttttaaggtgtggaggaacctatataactaattgg

SEQ ID NO: 48328 - DNA, 386 bp, Gossypium hirsutum
  Clone ID: LIB3196-049-P1-M1-H3
cggacgcgtgggccagcaccagctgcagtatctcctcagccaccgacatcagcggttcctactcatccccctcaaccagcacaatctgttcttcctcctcatcaattgccagcaacactcccctctcaagtgctgcgagctcctccagtacgaattgcccaagcagtcaccattaggcaagtagttcctgtatttgctgctccaccggtacggagaagataaacaatccgttcctctcagaaatgaagatatcacaaccgctactgctgctcccccgcctaaccaatcacctattcaagcagaggaagcagcaagcacaatatcgaagaacctgcaagaatctgagacagtacagagtttagaacaactcaaaatctgatggcaag

SEQ ID NO: 48329 - DNA, 389 bp, Gossypium hirsutum
  Clone ID: LIB3196-049-P1-M1-H4
atatcaatcccgaaaaagaaatttcaggttttgcattgaattccatcaagcgagcaacaatgggtttcttggagctgctgtaatgtaaattgtaaatgtagtgtatgtccatacactcaacagaggagtaaaagaaaagagaagatgcaatctcgtgctccgccaaccaaatccaaatgggaaattccatcgctcacaaaacccgttacgcattgaccttcctctgcttcatacttctcgtcctctttacccttttcctcttcaccaaacgtacgctcgaaccctacctctccttctatcaaccatccttccatatccactcttcaaatgccgcattcattgatggtaaccaaactcttgacactgctcacgagaatagggaaatgtgt

SEQ ID NO: 48330 - DNA, 388 bp, Gossypium hirsutum
  Clone ID: LIB3196-049-P1-M1-H5
tgaatattggtttgagtgagtggttaatgagtgagtttgaaacggttcaacctttttaaaggaatgggcgttggaaagcaaaaatattgtgaattgggaaatgatgtggtaagcaaaggaaactacttcatggcgtgaggactacgcacttgggtcatgggttgcgcgtcggtgctcgcaaccatgacaaactggtgcgatccatcgtgttcgagggaggtcatttagcccaaccaaactggcttaaccaaactggcccagtgattggagagattaaaagcccatctcaagagcctgatagaaatgggaagtgttctagaagatataattatggaatcttagagttctatttgtatatagctggttatgtaagcttagagttctaatt

SEQ ID NO: 48331 - DNA, 408 bp, Gossypium hirsutum
  Clone ID: LIB3196-049-P1-M1-H6
atcgcgcagttcggcagcagcagccgcggagcagtagccgccgtgggagggagccatgaagcactacgaggtggagattctggatgcaaagacaagggagaagctgtgtttcctggacaaggtggagccccacgccaccattgcggagatcaagaacctcttcaccaagacccatccgcaatggtaccccgcccgccagtccctccgcctggaccccaagggcaagtccctgaaggatgaggatattctacagaagctgcccgtgggcaccacggccacgctctacttccgggacctgggggcccagatcagctgggtgacggtcttcctaacagagtacgcagggccccttttcatctacctgctcttctacttccgagtgcccttcatctatggccacaaatacga

SEQ ID NO: 48332 - DNA, 381 bp, Gossypium hirsutum
  Clone ID: LIB3196-049-P1-M1-H7
gaacgagagaatgaacggcaacccgcaatccagcgatgggaagcacgatgatgactctgctctctccgatttccttgcctctcttatggattatgctcccactatacctgacgaattggtggaacattacttagccaagagtggatttcaatgtcccgatgttcgattaataaggcttgtcgctgttgccactcagaagttcgttgcggaagttgcaagtgatgcacttcagcattgcaaggcaaggcaagctgcagttgtcaaagacaaaagggagaagcagcaaaaggataagcgcctaatcttgacgatggacgatctttcaaagtcattgcgcgagtatggggtgaatgtgaagcaccaggagtattttgctgatag

SEQ ID NO: 48333 - DNA, 378 bp, Gossypium hirsutum
  Clone ID: LIB3196-049-P1-M1-H8
cccacgcgtccgcggacgcgtgggctgtttctctcttctatattttcccaagattattttctctttcctttttttcctccctattttttttctcgggaaaaaaagactttttttccggtatacccagatcttgtttagttccaagctttaggttgtcatcgttttctcgaggttttaaactatgggtatctcttgaatttgtgaagcaaagggagaaatattggttaaaaactagtagcagtgtattgaatcaagttttacaaaaaaagaagttaaaaagaaagatgaaaatccagtgtgatgtttgtgagagagctccagcaacagtgatatgttgtgcagatgaggctgcactttgtgctaaatgtgatatcgaag

SEQ ID NO: 48334 - DNA, 388 bp, Gossypium hirsutum
  Clone ID: LIB3196-049-P1-M1-H9
atctttaagagtgatactttgaatacaaccttttatcatattttaagttttaatactgggaaataaagtgtctacattaaaactttaagaaaataattgaatgaattttaggcccaaataaaagtttgatatattgtatttattctctcctttgatatagcagagacaaagtatgtcctcatagaagtcatttttactttttctggatatggccttcataaatttgcatagaaaaaatattttctcctaaaacaccataagaaactactactttttttctgcatggtttaggcctttattatttaagataataggcatttttagaactattatcaaatagttatgtttatttagattcaactattttttaaaagaccagactattttt

SEQ ID NO: 48335 - DNA, 400 bp, Gossypium hirsutum
  unsure (1)..(400): unsure at all n locations; Clone ID: LIB3196-050-P1-M1-A1
atcggcactggtggctttggcggtggatttgggggctccttcagcggtaagggtggccctggcttccctgtctgccctgctgggggaattcaggaggtaactatcaaccagagcttgctgacccccctccacgtggagattgaccctgagatccaaaaagtccggacagaggagcgagaacagatcaagctcctcaacaacaagtttgccttcttcatcgacaaggngcggttcttagagcaacagaataaggtcctggagaccaaatggaagctgctccagcagcagacgaccagcacctccagcaaaaaccttgagcccctctttgagacctacctcagtgtcctgaggaagcaactagataccttggtcaatgacaaagggcgcctgcagtctgagc

SEQ ID NO: 48336 - DNA, 412 bp, Gossypium hirsutum
  Clone ID: LIB3196-050-P1-M1-A10
atgcacctacggcgggggcctgtctgtctcttcctcccgcttctcctctgggggagcctgcgggctggggggcggctatggcggtggcttcagcagcagcagcagctttggtagtggcttcgggggaggatatggtggtggcttcggtggtggcttgggtggtggcttgggtggtggctttggtggtggctttgctggtggtgatgggcttctggtgggcagtgagaaggtgaccatgcagaacctcaacgaccgcctggcctcctacctggacaaggtgcgtgctctggaggaggccaacgccgacctggaggtgaagatccgcgactggtaccagaggcagcggcccaatgagatcaaagactacagtccctacttcaagaccatcgaggacctgatgaacaagatcatt

SEQ ID NO: 48337 - DNA, 389 bp, Gossypium hirsutum
  Clone ID: LIB3196-050-P1-M1-A11
cggacgcgtggggaagacccgatcggccgtgttttgaagaaaacacagcttgcagatggacttattttagagaaaacctcaagtcctttgggtgttcttttgattgtttttgaatctcgacctgatgcgcttgtacagatagcctcattagctatccgaagtggtaacgggctccttttgaaagggggaaaggaggccaagcggtccaatgctattttgcataaggtaataactgaagccattccagacattgttgggggtaaagttattggacttgtaacttcaagagatgagattcctgatcttttaaaggttggtggccgtattggttcttggatcccacgaggcagcaacaagcttgtttcccaaatcaagagttcaaccaaaat

SEQ ID NO: 48338 - DNA, 370 bp, Gossypium hirsutum
  Clone ID: LIB3196-050-P1-M1-A12
aaaaaaacattaaagaaaataaaaatcaccatcgttattatttttcaaatcatggtacaaaagagaaaagatcagttgttctcaggttaataatttatattatgtctattacttttggttcttcgattgtcagttctctatagaccgtagaggaaatgtaatttattttcttggttacaggttgctctttacctctgctatgtcataatgttttataaattggatataagtgactatttaatctttgcattttaaggaggaacttatctgttatttattttagaattgtttttcttcagctgaaataacccttgacaaatgtgacattgaattcctcacttgtattagatttgatgcactggagatagca

SEQ ID NO: 48339 - DNA, 420 bp, Gossypium hirsutum
  Clone ID: LIB3196-050-P1-M1-A3
atcccgcagtgaaggttgcccgaggatggtcgggcctggcgttgggcgtgcggcgggctgtcttgcagcttccagggttaactcaggtgaggtggagccgctatagtcctgaattcaaggatcccttgattgacaaggaatattatcgtaagcctgtggaggagctaactgaggaggagaagtatgatcgggagctcaagaagactcagctcatcaaagctgctccagcagggaaaacaagttctgtgtttgaagacccagtcatcagtaaattcaccaacatgatgatgaaaggaggaaacaaagtactggccagatccctcgtgactcaaactctggaagctgtgaaaaggaagcagtttgagaagtaccattccgcttctgcagaggaacaggcaaccatcgaacgcaacccctaca

SEQ ID NO: 48340 - DNA, 358 bp, Gossypium hirsutum
  Clone ID: LIB3196-050-P1-M1-A4
ctgtactgaagtttgcacaatgcactggttgtcatgcaattgctggaaggcacactcctggtaccttcactaaccagctccagacatcgttcagtgagcctcgtcttcttatcctcacagatcccaggactgaccaccagcccatcaaggaagcagctctcggaaacattccaaccattgctttttgtgatactgactcaccaatgcgatatgttgacattggtatccctgccaataacaagggaaagcacagcattggttgccttttctggctgttagctaggatggttcttcaaaagcgtgggaacaattgctcctggacagaaatgggatgtcatgggtggtctattcttctaca

SEQ ID NO: 48341 - DNA, 394 bp, Gossypium hirsutum
  Clone ID: LIB3196-050-P1-M1-A6
cccacgcgtccgcagtcggtaacttaattttgatatctcagaatgtaccgcaatataaccaccgcattttttgaaataaaatactttggatatgcctaatttacgctgaatttgcctcggtagaggtattttcaagtatagctttaacaacttccaaactattagattgtataatgacttcatggtgaccccttcattaaattagcctgagaccctccaaaatgccccaaagttcagcattaaaactgttgtaataaagtggctgatgccctttgcaattgggctaaaacaaacaattggtaaaatggattttaacatggattatgcttcggagaaccatgattttgttttgaatgatgccattaattgaaagttgacccttaagtcttttatc

SEQ ID NO: 48342 - DNA, 345 bp, Gossypium hirsutum
  Clone ID: LIB3196-050-P1-M1-A7
agattcaaggatattgagaagaagtttctaaagattttttcaagctagctatgggaactcttgcaatcgataccgagtgtgtggattctgacatataccgtgctttgggattcaaagaattgggtaaaggagttgttggaactccacggattttgtcactgctttcttcgcttcttgaggaatccgtccaaagaaacgagatggagtccgagacggtgaagttcaaagataatgttgccatgtttcatgggttaagaagctccaccataagcattcagcattatattgatcgcatcttcaagtatgctggctgcaggccgttgtgctttctcggtgcatacattt

SEQ ID NO: 48343 - DNA, 340 bp, Gossypium hirsutum
  Clone ID: LIB3196-050-P1-M1-A8
atggaaagcaccggaagacaggccgcgacgtggcagttaaggtcattgacaaactgcgcttccccaccaagcaggagagccagctccggaacgaagtggccattctgcagagcctgcggcaccctgggatcgtgaacctggagtgcatgttcgagacgcctgagaaagtgtttgtggtgatggagaagctgcatggagacatgttggagatgatcctgtccagtgagaagggccggctgcctgagcgcctcaccaagttcctcatcacccagatcctagtggctttgagacatcttcacttcaagaacattgtccactgtgacttgaaaccaggaaacgt

SEQ ID NO: 48344 - DNA, 426 bp, Gossypium hirsutum
  Clone ID: LIB3196-050-P1-M1-A9
atcaggacagcgtggaggacttcaagaccaaatatgaagaggagatcaacaaacgcacagcagctgagaatgactttgtggtcctcaagaaggacgtggatgctgcctatatgaacaaggtggagctggaggccaaggtggacagtcttaatgatgagatcaacttcctgaaggtcctctatgatgcggagctgtcccagatgcagacccacgtcagcgacatgtccgtggtcctctccatggacaacaaccgcaacctggacctggacagcattattgctgaggtccgtgcccagtacgaggagattgcccagaggagcaaggctgaggccgaggccctgtaccagaccaaggtccagcagctccagatctcagttgaccaacatggtgacaacctgaagaacaccaagagtgaaatcgcagagc

SEQ ID NO: 48345 - DNA, 281 bp, Gossypium hirsutum
  Clone ID: LIB3196-050-P1-M1-B1
ctgatttttaagttttctatgtgtccattcggccaaaagagatgattgttcattatccaaagctgccatttatttccttctcattgctggaaatcttttggccattcggttcaaggtgttcacaccttaaggctcttcaaaaccgtccattcacacctgatatggctgcttcaggtcctctctttattattggtaaattttcagcaatagttgcctcttgaatgctcatttaaacccattagctgaatgtagctgctacatgcatctccaagatccatttg

SEQ ID NO: 48346 - DNA, 367 bp, Gossypium hirsutum
  Clone ID: LIB3196-050-P1-M1-B11
atccaacgtgttcagcatcatgtgaacggagtctgccggacgtctccgcgacctccagccatggtgctcagtcatggggtcctggaggttgaggcacttctgtgccgcacgtttttgtggtttatggcgatgtccgagcagagtttgagaggatgggtctcagagtgagaaaaagaaaagtaaaatggcgatgctccgtgtggagagtgtgagagcggtggctgccaagggaaagccctgcacagccctcctgccaccctgcacggggctccccgcacaaccccgcccaagaccacttgatgtggggatggaccatcgaagggagtatgggctttaaaaggtgccagacactgaggaggcacatgcc

SEQ ID NO: 48347 - DNA, 386 bp, Gossypium hirsutum
  Clone ID: LIB3196-050-P1-M1-B12
cccacgcgtccggacgactttgtgtcgatcacatttacctagggctgtatgccggttatgttactctagttgatggctatgtgcctaacataatgcagttatcaatgggtttgtgccacgtattctgttaagtggctttgccacattatctgtttctggtggctatgctacaaatatctgttctggtgtccctgtcacaatatctgtatctggtaactctgtcacaatatctgttctggcagccatgctgcaaattctgtggtgtgtagtaaatggggtggtccagttgtctccccacatggcgtaaggttggtacgggggtgtatacagctggattgggttgggattgcattcacattctaattctgattctattacctaatact

SEQ ID NO: 48348 - DNA, 396 bp, Gossypium hirsutum
  Clone ID: LIB3196-050-P1-M1-B2
atgtgtgatgagaacggctctaagggttatgcatttgtccacttcgagacccaagaggctgccgacaaggccatcgagaagatgaatggcatgctcctcaatgaccgcaaagtatttgtgggcagattcaagtctcgcaaagagcgggaagctgagctgggagccaaagccaaggaattcaccaatgtttatatcaaaaactttggggaagaggtggatgatgagagtctgaaagagctattcagtcagtttggtaagaccctaagtgtcaaggtgatgagagatcccagtgggaaatccaaaggctttggctttgtgagttacgaaaaacacgaggatgccaataaggctgtggaagagatgaatggaaaagaaataagtggtaaaataatattt

SEQ ID NO: 48349 - DNA, 409 bp, Gossypium hirsutum
  Clone ID: LIB3196-050-P1-M1-B3
cggacgcgtgggctgaaatataattacgatgaggatgagctgtaatggctgcagggtcctgcgtaagggctgcaccgaaaactgcaccattagaccttgtcttcaatggatcaagtcctctgattctcaagccaatgctactctcttccttgccaaattctatggccgagctggtctcctcaacctaattgaagccggccctgaaaaccttcgccctgctatttttagatcacttttatacgaggcctgtgggcgtgtggtaaatccagtttatgggtcaattgggatgctttggtccgggaactggggtgagtgccaagcagccgttgatgctgtgctgaaaggctcccccataacccaaacttcatcatctttggaatcagttgaagaagagcaaccgatttcccct

SEQ ID NO: 48350 - DNA, 394 bp, Gossypium hirsutum
  Clone ID: LIB3196-050-P1-M1-B4
aaatgatgtcacttttttttatataaactaaaaaatatttcatgtttatttttaaagaactttaaataagatgtcatcatatgattatttgatatatcaaattataaattgtttctccataaaaaaatttagatgaagaaatataaaagcacgttccatatgatcatcttcattccaaagtttttccatcttgccatctcgtaatttcaacacgataagattctttgaattaaaacttgataaagatttgaaggggaaataatcccaacaaagataccttagcttattaggaagagatacactatcaacttggtttgcaagtagcttcgggttccaatcctctttctcaatctcaggtttatagaagtaaatatatctaagattaaacatgttc

SEQ ID NO: 48351 - DNA, 254 bp, Gossypium hirsutum
  Clone ID: LIB3196-050-P1-M1-B5
atgaaaaagaaaacataggtctcttaaaccaggcaactttcacattctgggagttgagactgagcaatttctccttgtaacaaagaatctccatgaaattccgtttcatctgttaactgtcactgagcacaacactcctcctctgggctctcttcctgctcctccagattctgctgctttccaattctctggtgatcttgagactaacaactggagactgaggccggagcagctgactcctggcagctgtgctt

SEQ ID NO: 48352 - DNA, 89 bp, Gossypium hirsutum
  Clone ID: LIB3196-050-P1-M1-B6
tccatatgtatatgaaactaatgttcaagcacattaacctaccattatttgtcacttataatactgtaattactggctcagagcctaac

SEQ ID NO: 48353 - DNA, 345 bp, Gossypium hirsutum
  Clone ID: LIB3196-050-P1-M1-B7
atggggtctgggatgggtaccctcctcatcagcaagatccgggaggagtacccagacaggatcatgaacacgttcagtgtggtgccttcgcccaaggtgtcagacacagtggtggagccctacaacgccaccctctcagtccaccagctcgtagaaaacacagacgagacctactgcattgataacgaagctctctacgacatttgcttcagaaccctaaagttgaccacgcccacctatggtgacctgaaccacctggtgtctgctaccatgagtggggtcaccacctgcctgcgctttccgggccagcttaatgctgacctgcggaagctggctgtgaacatg

SEQ ID NO: 48354 - DNA, 398 bp, Gossypium hirsutum
  Clone ID: LIB3196-050-P1-M1-B8
cggacgcgtgggcaccgccataagcgaaatcaaaagccagcagcgctgcagctaaaagagcagtcgtttgacaattattcgccatgggtaaggttcacggatctctagctcgtgctggtaaggtgagaggccaaactcctaaagtggccaagcaagacaagaagaagaagccccgtggccgcgcttacaagcggatgcaatacaaccgccgcttcgtcaccgcagtggttggatttggcaaaaagaggggacctaactcatctgagaagtaagagatctatgtaggtgaaagaaggcaagaagccttgttgaaagctttgatggattttaagtctttgttttcttttgataatgtttttatgatactggtttcaaggattggattgaactaccatttt

SEQ ID NO: 48355 - DNA, 406 bp, Gossypium hirsutum
  Clone ID: LIB3196-050-P1-M1-B9
cccacgcgtccgcccacgcgtccgcaaatttctgcgaaaaataaagctatatatataaaaagcagctattgaaagaagtggagctgatgggttcgtctttcggtgaagcttttccagcaatgcaggaaactttgctggagtttcgtgctggtaaaatgatgttggaaggaaaaagggttgtccctgatacacgtaaagggctcattcgcatagctaggggtgaggagggactggttcattttcagtggcttgatcggactcaaaatgttattgaagatgatcagattattttccccgatgaggctgtttttgagaaggttaatcaagcatcaggcagggtttacatattaaagttcaataccgacgaccggaagttctttttctggatgcaagagccgaaagctga

SEQ ID NO: 48356 - DNA, 409 bp, Gossypium hirsutum
  Clone ID: LIB3196-050-P1-M1-C1
gatagatctcgtcactaaccatcaccaggatccaccttgggggcagcctcagcaacctcagccacgtcaccaatcccaatgccaactccagaacttgaatgctcttcagcctaagcaccggtttaggtcagaggctggtgaaactgagttctgggaccaaaatgaggatcaattccagtgtgctggtgttgctttcctacgtcataagatccagcgcaaaggacttttattgccttcatttaccagtgctcctatgcttttctatgttgaacaaggggagggtattcatggggcggtcttcccaggttgtcccgagacatatcaatcacagtcgcaacaaaatatacaagataggccacaaagagatcagcaccaaaagctcagacggttgaaagagggcgatgtggtt

SEQ ID NO: 48357 - DNA, 488 bp, Gossypium hirsutum
  unsure (1)..(488): unsure at all n locations; Clone ID: LIB3196-050-P1-M1-C11
ctgtccgtgcttctactaaagcattcagaattcgccacttgcaagggtngtctggagtncttaggcganncagaaggaannatgttaagggcttcannacagcaccanntcagcaacctattctatgctacctaccatctatctagaatccatggtttnntcgatgtattccaacngnngtgatgattacttttngatccactaanncacgtggnngccctganntttcaggnntagcttgattctttagagtagagnntaccttaacttataggtcgagaggtgtcttnntaatttttnntccccccaagaattaaatttaagttatttggagattcattnnagtgaattccaagtttttttgttttttgataatnnntttcgtagactaaaattttctcttttgagtttgggcttttttttcctgccaaattttggcaaactcattaaaccccacttttcttacctgaggcaaatttagtaatttt

SEQ ID NO: 48358 - DNA, 420 bp, Gossypium hirsutum
  unsure (1)..(420): unsure at all n locations; Clone ID: LIB3196-050-P1-M1-C12
atctgagagtcgcgcagagtggagtcagaggcaatcagtcctcgctccggtctctggggatccggaccgcggcggcggccccgcggacgggatgttccggggcttgagcagttggctgggcttgcagcagccggcggcaggcggtgggcagcccaatgcagacgctccacccgaacagccatccgagacggtggctgagtccgcggaggaggagctgcagcaaacgggagaccaggagctcctccaccaggccaaagacttcggcaactatttatttaactttgcatctgctgccacaaaaaagataactgaatcagttgctgaaacagcacaaacaataaagaaatccgtagaagaaggaaaaatagatggcattattgacaagacaattataggagattntcagaaggaacagaaaaa

SEQ ID NO: 48359 - DNA, 409 bp, Gossypium hirsutum
  Clone ID: LIB3196-050-P1-M1-C2
gagaatgtttccatcattccaattgtggggttaggagggttaggaaagactgctttggcgcaatttgtctataatgatgaaatggtcaaaaatcattttgagttgatgatgtttgtgtgcgtttcagatgtttttgatgtcaaaataattgtagaaaatatgatcaaatctgcaactggtgaagcaccaaatcaaaaactcgaaatggatcaattgcaaacccaacttcgaggaaaaattggtgggaaaaaatatttgcttgttttggatgacatttggaatgaggagtgggaagaatgggttagtttaaaagagttattagtaggtggggctaaaggaagtaggataatagtaactactcgctctttgagagtagcaaagattacaagtaaatgtcaaccttatgttc

SEQ ID NO: 48360 - DNA, 426 bp, Gossypium hirsutum
  Clone ID: LIB3196-050-P1-M1-C3
atcggagggtcgtcttaaagggcccgcgcgccgccgccccctcggcccgccatgctgctatccgtgccgctgctgctcggcctcctcggcttggccgccgccgagcccgccgtctacttcaaggagcagtttctggacggagacgggtggacttcccgctggatcgaatccaaacacaagtcagattttggcaaattcgtcctcagttccggcaagttctacggtgacgaggagaaagataaaggtttgcagacaagccaggatgcacgcttttatgctctgtcggccagtttcgagcctttcagcaacaaaggccagacgctggtggtgcagttcacggtgaaacatgagcagaacatcgactgtgggggcggttatgttgagcttgttcctaatagtttggaccagacggacatgcacggagac

SEQ ID NO: 48361 - DNA, 388 bp, Gossypium hirsutum
  Clone ID: LIB3196-050-P1-M1-C4
gttcgttttgcatctctgctgctctttcttctctaattattgaggaaatccaccgatcaaagttgttcaaatcgtgggtgaaagttttgagaaactaaaatggcgtccacattcagcggcgatgaaactgctccattctttggcttccttggggccgctgctgctctcgttttctcctgtatgggagcggcgtacggaacggccaagagcggtgtcggagtggcgtccatgggagtgatgaggccagagctggtaatgaaatcgatcgtccccgttgatatggctggtgttttaggtatttatcggttgattcttgcggttattataagcaccgggattaacccaaaggccaaatcttactaccttttcgatggttatgctcatcttt

SEQ ID NO: 48362 - DNA, 403 bp, Gossypium hirsutum
  Clone ID: LIB3196-050-P1-M1-C5
ggttaacgctgatattgtggagacctataaggctgcttgcgataaatatcttatgaaccgagggagtagaggcaaaagaaagaataagcaatattttgaatccgacagtctccctgttggtccttctggagtttatatgcaatcccctgtctccttggacaaggcattgaaaaatccgtctgagttagaagggatgcagaattctcacttgagggatgcagctgctttggcacagttctggtgctggctggaagaggaaattcataagaacgtgaaacttactgaggtagaccttgcagacaaacttctagaattccgttcgaagcaagatggtttcctagatacgagctttgatacaataagcggctcgggtgcaaatggtgctattattcattacacacct

SEQ ID NO: 48363 - DNA, 404 bp, Gossypium hirsutum
  Clone ID: LIB3196-050-P1-M1-C6
aagaagagggatctgaggaagaagaaagagaagaacgaggaagaggaaggagaaggtcaggaaacggcttagaagaaacattctgctcaatgagactgaaacacaggacccctgcttcctctgctgatgttttcaacccacgaggtggtcgcatcaccacagttaacagtttcaatcttcccattctccaatacctccaactcagcgccgagaggggagtcctttacaataatgctatctacgctcctcactggaacatgaatgcccacagcattgtttacatcacaaggggaaatggaaggattcaaattgtgtcggaaaatggagaggcgatattcgatgagcaggttgagaggggtcaggtcataaccgtaccccagaatcatgcagtggtgaaaaaagca

SEQ ID NO: 48364 - DNA, 284 bp, Gossypium hirsutum
  Clone ID: LIB3196-050-P1-M1-C7
ctttttggagttgcataagcagagcaacgcagtcgcttttttggggttttttcttcttcttttagacaaaccttaatcgtcgaagatgccgaagtccaagcgtaacaaaatagtttcattatcaaagacaaagaagaagggtaaagaacataaagaatcaattgtgaatgccataagggaagctgcggaagattacaattccatctatgttttctctttcgagaacatgagaaatcttaaattcaaagagtttagagagaagctcaaacctaccaacagatttt

SEQ ID NO: 48365 - DNA, 394 bp, Gossypium hirsutum
  Clone ID: LIB3196-050-P1-M1-C8
tgaaaaacatgcatccggaaataccaaagtgggtattgacttggggggaggtgactccgaggatggtgtttgcaaagatgtgtcaaccctgaatatttgggatctttatgtcaccaagtttttcgctctcaaatatgctgctgatgctgcctgcactgttctacgggttgatcagattataatggcaaaaccagctggaggtcctggaaggagagagcagcctgcaggaatggatgaggactaagtcttctaatctgcaacatgatatgccattcctttctttttttctcatcagggctggttcggactttgttaggcatcttcggagatgctaaaaaccctttgaaacaaagttttgcttttgttttgaaaattgttatggttctgtgttttc

SEQ ID NO: 48366 - DNA, 323 bp, Gossypium hirsutum
  Clone ID: LIB3196-050-P1-M1-C9
attgccgcgcccccagcacctacggcgggggcctgtctgtctcctcctcccgcttctcctctgggggagcctatgggctggggggcggctatggcggtggcttcagcagcagcagcagctttggtagtggcttcgggggaggatatggtggtggcttgggtagtggcttgggtggtggctttggtggtggctttgctggtggtgatgggcttctggtgggcagtgagaaggtgaccatgcagaacctcaacgaccgcctggcctcctacctggacaaggtgcgtgctcttgaggaggccaacgccgacctggaggtgaagatc

SEQ ID NO: 48367 - DNA, 404 bp, Gossypium hirsutum
  Clone ID: LIB3196-050-P1-M1-D1
agcaaatatgtggagacattggaagaactgaggaatttcaaggcagctgggaaccctttcactgatgaattctttcaaatatttcaatctgtttataggcaacaaatagcaatgcttgagaagctgcatcagaggaagaacaagcttgacaagaagctcaagtgtatccacacgtggcgtaaggtatcgagcatgatattcgttgccacgttcgccacagtgttgatttgttcggttgtggcagccgccatggctgctcctccggtggctgctgcactcgccgctgcaacgtccatcccattgggttcgatggggaaatggatcgattccctgtggaggaactacgaaaacgtgttgaaagggcaaaaggaagtgatcacctcaatgcaagcaggcacttatgt

SEQ ID NO: 48368 - DNA, 317 bp, Gossypium hirsutum
  Clone ID: LIB3196-050-P1-M1-D10
atgtcagccgcgttttctcttgcatcgccagcgcatccctgagacaccatggggaaggtgaaggtcggagtcaacggatttggtcgtattgggcgcctggtcaccagggctgcttttaactctggtaaagtggatattgttgccatcaatgaccccttcattgacctcaactacatggtttacatgttccagtatgattccacccatggcaagttccatggcaccgtgaaggctgagaacgggaagctcgtcatcaatggaagccccatcaccatcttccaagagcgagatccctccaaaatcaaatggggcgatgc

SEQ ID NO: 48369 - DNA, 368 bp, Gossypium hirsutum
  Clone ID: LIB3196-050-P1-M1-D11
cccacgcgtccgcctcttgatgatatctatgccaatgctatcagaaactgtgatcctgagggtcctcttatgctctatgtttcaaagatgattcctgcttctgataagggcagattctttgcttttggtcgtgtcttttctggcaaagtctcaactggattgaaggttaggatcatgggtccgaactatgtccctggtgagaagaaagacttgtatgttaagagtgtgcaaagaactgtcatttggatgggaaagaagcaggagactgttgaagatgtaccttgtggtaacacagttgccatggttggtttggatcagtttatcaccaagaatgctactttgacaaacgagaaggaagttgatgccca

SEQ ID NO: 48370 - DNA, 405 bp, Gossypium hirsutum
  Clone ID: LIB3196-050-P1-M1-D12
atcatggtgaggaacaagtcagttttcgtagttttgctcttttctcttttcctttcctttggcttgctttgctctgccaaagacttccccggcagaagaagcgaggatgatcctcgacagaggtacgaggactgccagaggcgatgccagtcggagacacgtggacaaacggagcaagacaagtgtgaagacaggtgtgaaaggcagtttaaggaggagcagcagcgtgacggagacgatcctcagaggagataccaggattgccgacaacactgccaacaggaagaaagaaggctgcgtccacagtgcgaacaaagctgccaggaacaatacgagagacaacagcagcagcagcctgacaagcgattcaaggagtgtcaacaccgttgccaacggcaagagcaa

SEQ ID NO: 48371 - DNA, 420 bp, Gossypium hirsutum
  Clone ID: LIB3196-050-P1-M1-D3
atcccgccgccagctcgccatggatgatgatatcgccgcgctcgttgtcgacaacggctccggcatgtgcaaggccggcttcgcgggcgacgatgccccccgggccgtcttcccctccatcgtggggcgccccaggcaccagggcgtgatggtgggcatgggtcagaaggattcatatgtgggcgacgaggcccagagcaagagaggcattctcaccctgaagtaccccatcgagcacggcatcgtcaccaactgggacgacatggagaagatctggcaccacaccttctacaatgagctgcgtgtggctcctgaggagcaccccgtgctgctgaccgaggcccccctgaaccccaaggccaaccgcgagaagatgacccagatcatgtttgagaccttcaacaccccagccatgtacgt

SEQ ID NO: 48372 - DNA, 376 bp, Gossypium hirsutum
  Clone ID: LIB3196-050-P1-M1-D4
ctggtgatgatttaaaccaggtggtgactgaccctgatgcgccaagtcccagcgagccaaccatgcgtgaatgggttcactggtacgttgtttcccgcccccccttgtttttgagaaaatattttgtaatcatgttgctgatcatttcgtaaaccatcacgcaatttgctttcgtcgctgtttcaggatcgtgtctgacattcctggaggaaccaaccccactcgagggaaggaaatcctggcatacatgggtccacggcctccagtaggcatacatcgctacatactggtgctgttccaacaaaagggcccgttgggtgcggtgcagcaaccggcgacaagagctaacttcagcactcgatttttcgctgaccac

SEQ ID NO: 48373 - DNA, 403 bp, Gossypium hirsutum
  Clone ID: LIB3196-050-P1-M1-D5
ggaaagtgacgaaggagagcaacaacaaaggaacaacccttactacttccatcgcagatcgttccaagaacgattcagggaagaacatggcaatttcagagtcctccagaggtttgctgacaaacatcatttacttaggggcatcaacgagttccgcattgccattttagaagcaaaccccaacactttcgttctcccacaccattgtgacgcggagaaaatttacgttgtcactaacggaagaggaacagttacgttcgtgacacatgaaaacaaagagtcatacaatgtagttcctggagttgtagtaagaattccagcaggaagcactgtgtacttggccaaccaagacaacagggaaaagctaaccatagcagtgctccaccgacctgtcaataaccct

SEQ ID NO: 48374 - DNA, 399 bp, Gossypium hirsutum
  Clone ID: LIB3196-050-P1-M1-D6
gtatattctccggagagttcccctttccatacttcttgcaatagtatatgaattttaatatgaggtatacatgatacattatgtgtctttcatcagttatattagtttttaatagaaataactaatttactctttgagcaaaatgtaatttgactcttagtacaatatctctatagcacttttattaaatcaagatttttttatttcaataataataatttcaaactaatacaaccaactttctttataacaatctcatttatttgtcaacattttgtatgttataaagaaatagttatacacctaagctaatatagttcatcctctctataattgtctcatttatctattataaatctatatcattttgcactaagaacaatactgatgctaactaaa

SEQ ID NO: 48375 - DNA, 428 bp, Gossypium hirsutum
  Clone ID: LIB3196-050-P1-M1-D7
acactatataacaagttggtacgcagaagcacgctggtgccccgccgcaatttccgggatgaaaaacacgcatgagaatgctaggttaaagaaggagatcattacccttcagaaagatttgagggataggacagatgtcattgggacgtctgatgaaatggcaagcgcattaagccaaaaaacagacgagcttaacacaccggtaaaagacttgtcacacaaatatgcagaaataaagaatgtgaaagagaagctagtctaagaaaattccaaacagacctgtgagatacttgcagtgcaaaatcttttgcaaaaacaacatgttccattggcacaggttgaagctctgaaaaaatctcttaatggcacgattgaaaatctaacggaagaattgaagaatatgcaaaggcgtgacgagaaagagcagt

SEQ ID NO: 48376 - DNA, 425 bp, Gossypium hirsutum
  Clone ID: LIB3196-050-P1-M1-D8
atcccgaacctcctcagccgcccggagccgcgcccggagcccggctatagaggctgcagtcgcagccgggagcccgcagcccgcgccccgagcccgccgccgcccttcgagggcgtcccaggccgcgccatggtgaaagtgacgttcaactccgctctggcccagaaggaagccaagaaggatgagcccaagagcggcgaggaggcgcttatcatcccccccgacgccgtcgctgtggactgcaaggacccagatgatgtggtaccagttggccaaagaagagcctggtgttggtgcatgtgctttggactggcatttatgcttgcaggtgttattctaggaggagcatacttgtacaaatattttgcacttcaaccagatgacgtgtactactgtggaataaagtacatcaaagatgatgtcat

SEQ ID NO: 48377 - DNA, 405 bp, Gossypium hirsutum
  Clone ID: LIB3196-050-P1-M1-D9
ctctaaaaccctcctcttcggcgaaaaacccgtcactgttttcggaatcaggaaccctgaggagattccatgggctgaagccggggctgagttcgttgttgagtcaactggagtgttcactgacaaagacaaggctgctgctcacttgaagggtggtgctaagaaagttgtgatatctgcccctagcaaagatgcacccatgtttgtaatgggtgtaaacgagaaagactacaagccagagcttgacattgtttccaatgctagctgcactaccaattgtcttgctccccttgctaaggttatccatgaccgatttggaatcgttgagggtctcatgactaccgttcatgccattactgcaacacaaaagaccgtcgatggaccatcaatgaaggactggagagg

SEQ ID NO: 48378 - DNA, 425 bp, Gossypium hirsutum
  Clone ID: LIB3196-050-P1-M1-E1
atccagcctctcacgctctccacagccctctcatctcctggaaccatggccagcacatccaccaccatcaggagccacagcagcagccgcaggggcttcagtgccggctcagccaggctccctggggtcagccgctctggcttcagcagcgtctccgtgtcccgctccaggggcagtggtggcctgggtggcgcgtgtggaggagctggctttggcagccgcagcctgtatggcctggggggctccaagaggatctccattggagggggcagctgtgccatcggtggcggctatggcagcagagccggaggcagctatggctttggtggcgccgggagtggatttggtttcggtggtggagccggcattggctttggtctgggtggtggagccggccttgctggtggctttgggggccctggctt

SEQ ID NO: 48379 - DNA, 416 bp, Gossypium hirsutum
  Clone ID: LIB3196-050-P1-M1-E11
atgagccaggtaggggaacgcagcggccagacacctcagcgctacctggcagaactggatttctctcccacctgcggcttaagtctgactgccagcctgcctgccacagccggactccaccactccggtagcctcatggctgcaacctgtgagattagcaacatttttagcaactacgtcagtgcgatgtacagctcagaggactccgccctggcccctgttccccctgctgccgcctttggggccgatgacttggtgctgaccctgagcaacccccagatgtcattggagggtacagagaagaccagctggtcgggagaacagccccagttctggtcgaagacacaggttctggactggatcagctaccaagtggagaagaacaagtacgacgcaagcgccattgacttctcacg

SEQ ID NO: 48380 - DNA, 233 bp, Gossypium hirsutum
  Clone ID: LIB3196-050-P1-M1-E12
aaaatatcaggcatatgttctctcattgctgaagactttcctatggtagaccaggcgccagtacgtaaaggtggaagtggaaaatcggctgcccgtctgaagtgcccaaaaaatactttgatttctaatgtgaaatttgctagcttcggaaatcctacaggaaagtgtgggtcttacagcatgggggagtgccatgatcctaactcaacattggcagtcgaaaaggtctgcct

SEQ ID NO: 48381 - DNA, 392 bp, Gossypium hirsutum
  Clone ID: LIB3196-050-P1-M1-E2
gatgattgggagcactactccaaactaaccaaggaaatcggagaaaaagttcagattgtaggagatgatcttttggtcaccaacccaaagagggttgcgaaggctattgccgaaaaaaacttgtaatgcccttcttctcaaggtcaatcaaattggatctgttaccgaaagtatcgaagctgtgaaaatgtccaagcaagctggatggggtgtgatggccagccaccgcagtggtgaaacggaggatacttttattgctgatctttcagtcggtttggccacgggccaaattaagaccggagctccatgcaggtctgagcgtttagccaagtacaatcagcttctgcgaattgaggaggagcttggtgcggaagctgtctatgctggagcca

SEQ ID NO: 48382 - DNA, 379 bp, Gossypium hirsutum
  Clone ID: LIB3196-050-P1-M1-E3
gctttccatcatgatttttatcaagttcttgaaaatttgagccatctttgccatgcatacacatcagttcactgccggccatatgtctctctttcacttgacctttacatttgaccaacaaaggaaggacagcttcataactcacagagcgttttgcgatgcattggctgaagaaagtgcaagactctctgccaaccaacttgccgccgccgcaaatccagctctcaacccatcttcgcttttccctttccaaaacccatgggaccctattcaaacctctaaccctaaccctaatggcccacttcaagtcaagcccgagtctcaccatctcacgccatacttccaagaactgccactcccgcctccaaaggccctgttc

SEQ ID NO: 48383 - DNA, 401 bp, Gossypium hirsutum
  Clone ID: LIB3196-050-P1-M1-E4
cccacgcgtccgagaggctctaattgctgctcacagaaaagaaattgaagacacaatggagattgttcgtgaagaaatgaagcttctggctgaggtggaccaaccaggcagccacattgacaattatgtgacccagctgagcttcgttctttcacgcaaggctgctagtctggtgagtcttcaagctcgccttgcccggttccagcatcgactgaaagagcaggagatactgagtcggaaaagagttcctcgttgatgccagctctttgttctctgctttcattgctgcatcagactctgtccatcgatgcacggagctgcattagggtcttgagaggaaattcagcagtgtgcaaagatcctgatcctatttcccccagcatcaaacgttgcagatcgcg

SEQ ID NO: 48384 - DNA, 400 bp, Gossypium hirsutum
  Clone ID: LIB3196-050-P1-M1-E5
aaaccccgtacttcaactcctataacccttatgctctaaacgaacatttcttcttcatcttcatcttcttcttctctttgttgtattttctctgtacttagaagggtattttcagttttcagttttcagttttcacttcaaattcctacctttcactttcttttcttgaagcttaacaacacagtagaaaaattttgttttgtttttttggctatggattttctcaggaatgtgtcagtctcgggtgaatatcatcaaccagagcaagtcctttcatcaccatgctctaaactgggtgcctctattgatgaccttttccccactcaaaatacggaagtggatgtgagtttggaggtgttgtctatatttgtagaagactgtttatcaagcactgggaact

SEQ ID NO: 48385 - DNA, 424 bp, Gossypium hirsutum
  unsure (1)..(424): unsure at all n locations; Clone ID: LIB3196-050-P1-M1-E6
atggtacatatacaccatggaatactatgcagccataaaaaagaatgagatcatgtcttttgtgggaacatggatggagctggaggccatcatccttagcagactaacacaggaacagaaaaccaaataccacatgttctcacttataagtgggagctaaaggatgagaacacatggacacaaaaggaacagacatgggggcctacttgagggtagagggtaggaggagggagaggagcanaaaaaataactattgagtactaggcttggtacctgggtgacgaaataatctgtacaacaaacccctatgacactagtttatctaacaaacctgcacttagtgacattattttcatatgtctcttggccacatatgattcttctttgaactatttattcataacctttgtccatttttagattc

SEQ ID NO: 48386 - DNA, 409 bp, Gossypium hirsutum
  Clone ID: LIB3196-050-P1-M1-E7
ataaaatggtgttccatgagaaaaacaacttcatttagctttcagaagtaattacaggtggtttgccccttgatatcctttgtatttgagtatgcagaagtttttgagtattttccagtatcgaattaaaagaagtgtgctgtagtgttgagaaataatagaactaataatttttactgcttcattaaggaccctcttaagtgaaagtggaattttttgtattgtaaattgtggggtccagccccacagggtcggtgggtttttctccctgtgtgtggagatgagagactgtaggaataaagacaagacaaagagatgaaaaacagctgggcctgggggaccactaccaccaagacgtggagactggtagtggctccgaatgccagactgtgctgatatttattggata

SEQ ID NO: 48387 - DNA, 418 bp, Gossypium hirsutum
  Clone ID: LIB3196-050-P1-M1-E8
atggcaagagtgcacctttgtttagatctgggagtaaagggaaagagctgtctgtctctcgtgtgttttcagcttggctctgtgggatcagttatgcctcattcctgaaaagggcctttttatccccccagaatgcttttcctttgccaataccaccttcctcagcctgccctttggaaaggttgagaagcttaaaaagtcaggtaacagaaggcatagatgggcttcagaacctgatttgtaaatgttaaggcaaggctggctgccactggtgagagtgacgcagcagcctataagaagtcactgcgcgtatgaggttgcgatcacagtgcatgtggcaggttagatttgagaaatggttaggattgttctgttggacaagtgcagacacctgcccagggaagcagctctctttttt

SEQ ID NO: 48388 - DNA, 311 bp, Gossypium hirsutum
  Clone ID: LIB3196-050-P1-M1-E9
cttgctttcagaaaggtgttcgaagtccctgatttcgcctctcagtagaaaagatgtcttcagctggcgaagctgcttgctcttacgccgcattgattctctatgatgatggcatccccatcactgatgagaagattgcaactctagtcaaagctgcaaatgtctctgttgaatcttattggccaagcttgtttgctaagctttttgaaaagtgtaacattgaggatctcataaccaatgttggtgctgccggtgctggtgccgcagttgctgcagctgcacctgttgcagctgatgcgctgtggggagct

SEQ ID NO: 48389 - DNA, 357 bp, Gossypium hirsutum
  Clone ID: LIB3196-050-P1-M1-F1
cccacgcgtccggtccagtcatgtgatgcttcactgctgctggactccacaagaaggagcttgtctgagaaggagacagacaggagctttggcctaaggaatttcaggtacattgagaccatcaaagaagctgtagaaagggaatgtcctggagttgtttcttgtgctgatatccttgttctgtctgctagggaaggcatcgtttcgttgggaggcccttatattcctctcaaaactggaagaagagacggtagaaggagcagagcagatgttgtggaggagtatcttccggaccacaatgagaccatctctggcgttcttgacaggtttgccgccatgggtattgacacccctgga

SEQ ID NO: 48390 - DNA, 384 bp, Gossypium hirsutum
  Clone ID: LIB3196-050-P1-M1-F10
acttaatttccatttactagcaatttcttcaagttcttttctttgtttttttaatcaatggctgaccactacctccaaaacactcaaccaatgactcaccaaatggtgaaagccgctactgccgcaacagccggtggttccctcctcattctctccggtttaatcctagctggcaccgttattgcgctcaccatagccactccactcttcgttattttcagtccagttcttgtccctgctctcattgcaacagctctcctagcaacgggtttcgttgcctccggcggtttcggtgttgcagctgtcacggtcctgtcctggatttacaggtatgtgacggggaggcacccaccggctgcggatcagttggatagtgcagggatg

SEQ ID NO: 48391 - DNA, 423 bp, Gossypium hirsutum
  Clone ID: LIB3196-050-P1-M1-F11
atcggttgaccaggtgaacggaagcaaggtggtgaggaagcactcagggacggacagaactgtgtgaagcccgccgggccccaccccgcgctgtccatgcactgtgagcaccactaggaaatctcagccacaccttttctgtttaattcccatgcatgccaaactcttttcacacctaccgaccaattctcctgctcctcttgccctcttcttcacaccaaaatatgattgtgtccctgctgcagaatatgtatttcctaattgctgtggccaaacgcctgtgtgccgaatcgcttgcttctgatcccgctccgtgtaacctaagtgcgctgcggacaaagccccggccacggctgcgtcactcctgatgttcacaatgccacatagtcacacacctaattctcaagtcggagcaacacatac

SEQ ID NO: 48392 - DNA, 332 bp, Gossypium hirsutum
  Clone ID: LIB3196-050-P1-M1-F12
cccacgcgtccgaactttgtttcatctgcttcatttgtttcgaaatctctgaacaaaaatggcctctttcaattgccttgctttagcattcttgattgctttgtcatttgcaagcattgatgttgggggagcagctcgtcaccttctgcagcagcctcaaccgcaaagtttaccatctttccctaatctcccaacgccatcccgacaatcattcccatggccaggggcgcttcctccacttcctaccacattgccaacaggactaccccctctgccaagcattccctcagtccccacaatcccaattgcaattccccctattcctttctctt

SEQ ID NO: 48393 - DNA, 349 bp, Gossypium hirsutum
  Clone ID: LIB3196-050-P1-M1-F3
cgtagatatggcgattaacccttctttgctctttctttcccttctttttctcttcaatggctgcctagctcgccagaccttttcgtcacagcagtcccaaaatgagtgtcaaatcaataggctccgcgcctctgcaccccagacccgaattcgctccgaagccggcaccaccgagtggtggaaccccaactgtcaacagctcaggtgtgctggtgtatctgtaatgaggcagactattgaacctaatggccttgttttgccttccttcaccaatgctcctcagcttctctacattgtccaaggaagaggtattcaaggtattgtgatgcctggatgtgccgaaacattc

SEQ ID NO: 48394 - DNA, 296 bp, Gossypium hirsutum
  Clone ID: LIB3196-050-P1-M1-F4
attgaagctcatttaaagagaagcatgcacccgattgtacatgaatctcaaagttgcttggtacactcttttaagtgtcctttcgtgaaacgatgagacactcatagatctttgtttgagctgatcagctaagacatcaatggaccaatcgatacttggtgttcacacccaaagaaccattcaaatctgagggttcacactaaaggccattcggctaccacaagatatattcatcagctgattatctattcggtgaaccatgaagcattaacttcagctcttaacaacattgaccg

SEQ ID NO: 48395 - DNA, 396 bp, Gossypium hirsutum
  Clone ID: LIB3196-050-P1-M1-F5
ggaaacatgttttccatgtggtgacggacaagatgaatcttggggcaatgcacgttatgttcaaattgaaagattataatggagctcatattgaagtgaaggcggtagaggattataagtttttgaattcatcctatgttccagtgttgagacagttagaatcggctaatctccagaagttttattttgagaacacgcttgagaatgccacgaaagatacgactaacatgaagtttaggaaccccaagtatttatcaatcttgaatcatttgaggttttatttaccggagatgtaccccaagttgcataggatattgcttttggatgatgatattgtggtgcagaaggatttgactggcttgtggaagattgatatggatgggaaagtgaatgggg

SEQ ID NO: 48396 - DNA, 280 bp, Gossypium hirsutum
  Clone ID: LIB3196-050-P1-M1-F6
aaacccttcttcaaggtttgggcaacaaaaccagcacagtcaaacaccatggcaaggttaggttatggttcttcagattcccaacttctacatatgatgctgagaaatatagttctcctctggtaccttcattttcatagtttttaataagcacttaatttctttcaatttttattatagttcaattattttattatataatggaacaactttcacatatgttcatctatatataaaattaatagaagcattatttgattgcttcaaacgtattcaacgt

SEQ ID NO: 48397 - DNA, 390 bp, Gossypium hirsutum
  Clone ID: LIB3196-050-P1-M1-F7
atgacaaggtgcgcgccctggaggaggccaacactgaactggaggtgaagatccgtgattggtaccagaggcaggccccggggcccgcccgtgactacagccagtaccacaggacgatcgaggagctgcagaacaagatcctcacagccaccgtagacaatgccaacatcctgttgcagatcgacaatgcccgtctggctgctgatgacttccgcaccaagtttgagacagagcaggccctgcgcctgagcgtggaggccgacatcaatggcctgcgcagggtgctggatgagctgaccctggccagagccgacctggagatgcagattgagaacctcaaggaggagcttggctaccttgagaagaaccacgaggaggagatgaatgccc

SEQ ID NO: 48398 - DNA, 264 bp, Gossypium hirsutum
  Clone ID: LIB3196-050-P1-M1-F8
atcttggccaccggctcgcggctcgtggaggcttgtccgagacgcacgcgagtcagactcgggttggggtcctggcggcggcggcgcgagcatgtcgtggcttttcggcattaacaagggccccaagggtgaaggcgcggggccgccgctgcctttgccgcccgcgcagcccggggccgagggcggcggggaccgcgtcttgggagaccggccggcgcccaaggacaaatggagcaacttccaccccaccggcctggagcgcgc

SEQ ID NO: 48399 - DNA, 400 bp, Gossypium hirsutum
  Clone ID: LIB3196-050-P1-M1-F9
gcttggtaggaaaaatggaaagaaattccattgtttggtagagttgaaaaatgaaaggaaagaaaataaaacatttgaaaaaggcataattttcaactatcatacccctcttattttctctcctcattggaatcattagtttttatgcattaggatggaaaatgatcatctcttctatttctttcctctcatttttcattcctaccaagtacattcaaaatttattttcttttcacttttccattttctcctcccatccttccacttttccacccaaccaaacacacttttaaagttcttttgcaatctgaaaagctagagggtatgcatttggtcatacctctggcatgtttgtttttatgttgctcatcaacctgtgtgaaaatgcaaatggacatgc

SEQ ID NO: 48400 - DNA, 373 bp, Gossypium hirsutum
  Clone ID: LIB3196-050-P1-M1-G1
gttagatgtcacaaatgtccgtgaacttgaagattttatcatcaatgaatgcatatatgcgggtatagtcagaggaaagctggatcagctgcgaagatgttttgaggtccaatttgctgctggaagggatttgaggccaggacaacttgggagtatgatacaaacactatcaaactggttgggcacattaaacaacttactcatctcaattcaagagaagataaaatgggctgatacaatgagcgagttggacaagaagcatcggaaggaggtcgaagataaggtggaagaagtaaagaagtcagttgccgtcaaggccgaccttgactttcgagggattgaagagatctactctggacctggtggagtgatg

SEQ ID NO: 48401 - DNA, 318 bp, Gossypium hirsutum
  Clone ID: LIB3196-050-P1-M1-G10
cggacgcgtgggaaaaaaggtgtttcctggtactttgcccttttcccttcagaattccttagtttttttttctcatccgtctcttagtctctgaaattttcctatttattgaaaaaggagaagaatgtcgggatctgagacgggaatgatggcgagtagagagccctacagcttgggcatgcaacagaagagtccggtggcgtcacaaccggcgatacagaacatgcgtttagcctttagggctgacggaacagctgtgtacaagcccatcacttccgccttactcacatattagccagcttccggcgatggtggggc

SEQ ID NO: 48402 - DNA, 270 bp, Gossypium hirsutum
  Clone ID: LIB3196-050-P1-M1-G11
atgttttggctttgcctgcattctacttcgatacagactggcacagcaactgaatatgttgctcatacattagcttttctttcataacctgctatcagttctctgatccatgaggaagagaaagagagtatctgacaggtaagattgctttttaaagttgttttaaatgcattacatgactgagaaaagaaaaatgcacattttattgttgcagtttaaaatttcatttcggtgaaactaaacgtgaaacaaaagggtaaaaggggtttg

SEQ ID NO: 48403 - DNA, 387 bp, Gossypium hirsutum
  Clone ID: LIB3196-050-P1-M1-G12
tcgcccacgcgttcgggcgtatgggtttacaaagccgttggcaactcctttgttttcaaaggttcgggcttgtcttaaaatgggtggcccatctcaattgcaggcagtgatttagtagatggaggaatattgagaaatgttatagacattagtagttagttggatcagcacctaaagtcagttaaactgttaacaatagttatagttttgttaacaattcccacattgtattataaatttcagagcttagtctcgtacaatgaaatgtatttgggttaactttcatcttcttgctttcttctttcgcgtcttatttcatccaaggagaaaaacataaatcaatttcatcctatgtgcatacttggtattaagaatggaagtcaatgc

SEQ ID NO: 48404 - DNA, 365 bp, Gossypium hirsutum
  Clone ID: LIB3196-050-P1-M1-G2
atcaaagcttatggctgcagctgttcggaacaagcgggatatatttagtttgctgggggttgactatatcattgcaccattgaaggtattgcagtcactcaaagaatcaattacttctcctgacgagaagtattcttacgataggaggttgtccccacagcctgctgccagatatgatttcaccgccgaagagctcacaaagtgggatcaactaagccttgcatcagccatgggacctgcatcggtggagcttctggctgcaggactggatggatacgttaatcaagcaaagcgagttgaggaattgctcgacaagatttggccacctccaaatgtctaaagtggctcgtctccgtttcaaagta

SEQ ID NO: 48405 - DNA, 395 bp, Gossypium hirsutum
  Clone ID: LIB3196-050-P1-M1-G3
cccacgcgtccgcggacgcgtggggtcgaaataggactaagacgatgtgcgatggcattactgatccggatttgggtccgatgtgtggaagaccattaggtttagggttccattacgctacgaatcagttgtatgtttgtgatgcataccttggtctcatggtgttagggtccggcagaagactagcaaccccactttcgaccggtgtagaaggcgtgccttaccgattttgcaatggtttagatgtccaccaattgtccggaaacgttttcttcaccgattccaccactaactatgatctaagaaatgcttcgaaaggattggaatcgaatgattcgacagggaggttgttaatgtataaacccgagcaataatcgagttacaggggtggttaa

SEQ ID NO: 48406 - DNA, 385 bp, Gossypium hirsutum
  Clone ID: LIB3196-050-P1-M1-G5
gtctcttccctcatctacccccaaatgtcctcacattatgtctttggtggccaacgaagattttcagcacattttacgtgtgctgaacaccaacgttgatgggaagcagaagattatgtttgcattgacctccatcaagggtatcggaaggcgattcgctaacatcgtttgcaagaaggctgatgtcgacatgaacaagagggctggtgaattgactgcacaggagttggacaatctcatgaccattgttgcaaaccccaggcagtttaaaatccctgactggtttttaaataggcagaaggattacaaggacgggaagtattcccaagtcgtgtctaatgctcttgacatgaagttgagggatgatttggagcgtttgaagaag

SEQ ID NO: 48407 - DNA, 320 bp, Gossypium hirsutum
  Clone ID: LIB3196-050-P1-M1-G6
atgtcggtttactcttgcttaccacccaccgtagcccaccttgcatgcatgaccagcccctccattccagcctgagctgtgtgtgcccctgcgggaggacccattgatgccagaaagctggtaactccctcccagcatccctgcggaaggagtcagtttctgagagtgtggcctttcaaggtgaatgatgaggaagggtttcccagtccccacagtggccccacctctgggccctgcaccagagccctcctgtgtcacagggagctgtgcatccatgcacacgcctacttacacacaacatttcacgtacacgctaattt

SEQ ID NO: 48408 - DNA, 392 bp, Gossypium hirsutum
  Clone ID: LIB3196-050-P1-M1-G7
gaaattgtgaactgaataaaatagaaatgaagcattgaattgcatgggtatgtatcgggtctcataggccttatttattatgaatttaatattttgagggtatattgtgaagaattataaaagcatgttaaaatttttttgaaagttttaatttagatgaaattttataatacggttaaatacgtttacaagcgtttgtgttctggtaatgcctcgtaccctattctggtatcgaatacgggtaaggggtgttacattagtcaccaaattttaataagttttcattttggtcaccccgttaactcaatgttattattcactcattttagtcactcaactttaaataaattttcatttttggtcaatcatttaactttttaaaaaatttattt

SEQ ID NO: 48409 - DNA, 351 bp, Gossypium hirsutum
  Clone ID: LIB3196-050-P1-M1-G9
cttcattgctcttccacctccgcaaatccccgcccaactctccgccgccgccaccgccaccgcaaccgccaccgccacagatccaagcaatgggccgcgtccgtaccaaaacagtgaagaaatcctcccgtcaggtcatcgagcgctactactctcgcatgaccctcgatttccacactaacaagaagatcatcgaagaagttgccattatcccatccaagaggctccgcaacaagatcgccggcttctcgacccatttgatgaaacggatccagaggggtccggttcgcggcatttccttgaagctccaagaggaagagcgtgagcgccgcatggatttccgccccgatg

SEQ ID NO: 48410 - DNA, 411 bp, Gossypium hirsutum
  Clone ID: LIB3196-050-P1-M1-H1
atcccacctggatttccatttccagggcctcctaattttcccccacaaagcatgtttggatttccaccacatttgccacctccattacttccccctccaggctttggctttgctcaaaatcccatggttccctggccacctgttgttcatctcccaggtcagccacagcgtatgatgggtcctctctcccaagcatcaaggtatataggcccacagaatttttaccaggttaaagacgttcggagaccagaaaggcgccatagtgacccttggggtaggcaagaccaacagcaactggataggccatttaataggggtaaaggggaccgcccaaagatttaataggattcacaccacttgaaaagagagcgacatgaaaaggaatgggagcaagaatctgaaaggcataga

SEQ ID NO: 48411 - DNA, 162 bp, Gossypium hirsutum
  Clone ID: LIB3196-050-P1-M1-H10
atccgtggtgctgtccatggacaacaaccgaaacctggacctgcacagtattattggtggtgtcagggcccaatacgaggagatttgctagagcacccctgatgccgactactggtgccacaccacgtactacgagctgctggttacaacaggcagacatgg

SEQ ID NO: 48412 - DNA, 374 bp, Gossypium hirsutum
  Clone ID: LIB3196-050-P1-M1-H11
cccaccttcaaaatctctgtacatgtttttatttttcttgtctatattatcaaaattttaaaccctcctttctctctctctctctctctctctctctctctctctctctctctctttcatttcttttctttttctctcccacaagttgcagttgcagagcttcgccattgttgtcttccttcaagctttttcagtttcttattcactcttcttcaacacccttttgatttttgctcttcaaccatggctgctttagtgcttccgctgctcatcctggctgccattactggccgctcaagtggcaactggtgtatatgcaaagatggtgtcagtgatacagtattgcagaagacactggactatgcatgtggtgc

SEQ ID NO: 48413 - DNA, 312 bp, Gossypium hirsutum
  Clone ID: LIB3196-050-P1-M1-H12
ggtgacactgtcgctctagaacaggcatgaacagcaggagcgggctggtaccggaccggcagtcccgggatgggcaccggcgcccgggggcgatgccacccggtgccgactgaggccaccggaccatggcccgatcgctgacctggcgctgctgcccctggtgcctgacggaggatgagaaggccgccgccccggtggaccaggagatcaacaagatacttttcgaggccaacaagcatgaccgtgccgagcttaagctgttgcttttgggccctgtggagagcgggaagagcaccttcatcaagcagatgc

SEQ ID NO: 48414 - DNA, 387 bp, Gossypium hirsutum
  Clone ID: LIB3196-050-P1-M1-H2
cgaccaccagctccaaggattgagacttacgatttagtggaacttgactctagccaacaatcgcttctgtgggatcgccttatgctagatcaacacttctcaatggcgaaccccacgccattttgtctcttagctcgccaacctctgacacagtaagctaacaaaccgattttgcaaccttcccaaaacatacaaagcggccgcctttgtatacattgaaaagcttacttcttaagggacatgggcggaagcatcagccccgtagtgcagagaaacgatgaatactcagcaaggaggctaaataccaatttttaagcctcatgaactcttttgggaatttttgacaaccttcggctagatgggtttagtggctcatggttgtggtag

SEQ ID NO: 48415 - DNA, 412 bp, Gossypium hirsutum
  Clone ID: LIB3196-050-P1-M1-H3
atccagggcccagatgggaaaatgcatggcaacacctgctccatgtgtgaggtcttctttcaacaagaagaaagagcaaaagcaaaggctaaaagagaagctgcaaaggaaatctgcagtgaatttcgggaccaagtgaggaatggaacacttacatgcaccagggagcataatcctgtccgtgacccagatggcaaaatgcatggaaacaagtgtgccatgtgtgccagcgtgttcaaacttgaagaagaagagaagaaaaataataaagaagaaaaagggaaagttgaggctgaaaaagttaagagagaagcagtacaagagctgggcagtgaatattggcaatatttgaggaatggacgactcccctgtaccagagagaatgatcctattgagggtctagatgggaaaa

SEQ ID NO: 48416 - DNA, 187 bp, Gossypium hirsutum
  Clone ID: LIB3196-050-P1-M1-H4
cggacgcgtgggaaaagggtcaaaattctgtgtgtttgtgaagcaattttaccaaaactttgaaaataccttattttcccctccatcttcccaaactcacaaaagattcttcccactccacttggtttgacatcatttgttctcccaatcttccaccactcaattttgatttctaaaattatattct

SEQ ID NO: 48417 - DNA, 273 bp, Gossypium hirsutum
  Clone ID: LIB3196-050-P1-M1-H5
atcgcgggggcggcgctgggcaattaatccggcccatgagcgccgaggacgaggagcagcagcccactgagatcgaatcgctatgcatgaactgttactgcaatgtgaggcgggggggtagggcttgggccgggacgagccgggggtcggacccagccaggtgggccttgccggggaccccgagacgcacccggagatagtaaggcggggaacgggagtttcattgattttttttccttcgctgctttctgcttcaccagggcatgacgcgcc

SEQ ID NO: 48418 - DNA, 477 bp, Gossypium hirsutum
  Clone ID: LIB3196-050-P1-M1-H6
gtgacagtgtcactctagaacaggcatgaacgcagggtcgggctggtaccggaactgccgggatggacaaggcgcgtgctctggaggaggccaacgccgacctggaggtgaagatccgtgactggtaccagaggcagcggcccgctgagatcaaagactacagtccctactgtaagaccattgaggacctgaggaacaagattctcacggccacagtggacaatgccaacgtccttctgcagattgacaatgcccgtctggccgcggatgacttccgcaccaagtatgagacagagctgaacctgcgcatgagtgtggaggccgacatcaatggcctgcgcagggtgctggatgaactgaccctggccagagctgacctggagatgcagattgagagcctgaaggaggagctggcctacctgaaaaagaaccacgaggaggagatgaatgccctgagaggccaggtgggtggagatg

SEQ ID NO: 48419 - DNA, 348 bp, Gossypium hirsutum
  Clone ID: LIB3196-050-P1-M1-H7
atggctttgctggtggtgatgggcttctggtgggcagtgagaaggtgaccatgcagaacctcaacgaccgcctggcctcctacctggacaaggtgcgtgctctggaggaggccaacgccgacctggaggtgaagatccgtgactggtaccagaggcagcggcccgctgagatcaaagactacagtccctacttcaagaccattgaggacctgaggaacaagattctcacggccacagtggacaatgccaacgtccttctgcagattgacaatgcccgtctggccgcggatgacttccgcaccaagtatgagacagagctgaacctgcgcatgagtgtggaggccgaca

SEQ ID NO: 48420 - DNA, 399 bp, Gossypium hirsutum
  Clone ID: LIB3196-050-P1-M1-H8
aaaaaaaaagaagcaaaaaaacatggccaaagttctgttgttcattgctctatgtgtgcttccagctttggttagtgctacacgcattctgaataaccaattggtggttgaaggctatgtgtactgtgatacttgccgtgctggttttgaaacccctaagactagaaggctagctgatgccatggttaagctggtatgctccgacaggaagaccggcggagttgttttcgagaaggagggatataccgacaaaaccggaaaataccagattcgtgtatccgaggatcacttggatcaaatctgggatgcagttcttgtgaagagcccccagcttggatgtgccacaatgtcccccggtcgtgaacgtgcccgtgttatcttgaccaactccaatggcat

SEQ ID NO: 48421 - DNA, 402 bp, Gossypium hirsutum
  Clone ID: LIB3196-050-P1-M1-H9
atgggagccaatgggagatgggaagaaaatcatttcattggccgataaccatatcctgctgtgggatttacaggaaagctcaagccaggctgtgctggccagctcagcctccctgggagggaagggacaactgaagttcacctcgggacggtggagtccgcatcacaactgcacccaggtggccacagcgaacgacaccaccctccgtggctgggacacccggagcatgagccagatctattgcatagagaatgcccacggacagctggtgcgggatcttgacttcaatcccaacaagcagtactacttggccagctgcggagacgactgtaaggtgaagttctgggacacccgaaacgtcaccgaacccgtgaagaccctggaggagcactcccactgggt

SEQ ID NO: 48422 - DNA, 207 bp, Gossypium hirsutum
  Clone ID: LIB3196-052-P1-M1-A1
ttttgtgaactcaatgtcgaaacgctacgggcctacgttaccgggtgggtggcaacaatcaaacccttttttcaagcagcggtcatggactcctgacgctgaccgagactaggcgatgtttattcggaaggaaaattacggatcgaagatacatcaattgcatagctttacgtaagatgatttcaatgagctcaaaggttgtacaga

SEQ ID NO: 48423 - DNA, 255 bp, Gossypium hirsutum
  Clone ID: LIB3196-052-P1-M1-A10
aatatatatatattaatagattattgaaaagtgtgagattttttaataatttttttaaatattgaaattttaatctttacttgatcattatatcaattaactataatatcgcaattatttttaatattatgtgataataattacctgatatagtggtacatataacataataccatctaaaattttagaaataataaaatttaacaaaacttgatagatctggcctcaagctcgaacccctctagcatgcacttc

SEQ ID NO: 48424 - DNA, 367 bp, Gossypium hirsutum
  Clone ID: LIB3196-052-P1-M1-A11
cccaaccccaatcctgttgctcttttgcatcctttgtttgtctcttcatctcctgcactacttgcaaaataacgagctgaagccgtgctacaataacactagtgttttcaacaataaattaatcatagccgcagcttgcttcttttaaactctaaatataaaggaggccaaacatgccgcctcgtagataccaatttgggagggctgatgaggccactcattccgactccatgagagccaccttggctgaattcctctccactatcattttcgtctttgccggcgaaggctcaattcttgctcttgacaagatgtacaatgatacgagtgcgacacctgcaagactggtgatgatagcacttgcgca

SEQ ID NO: 48425 - DNA, 375 bp, Gossypium hirsutum
  Clone ID: LIB3196-052-P1-M1-A12
aatttcttcttattggtactctttgttagttcgtcacatgataggctcttttgtctcggtttacttacgatggtagattaagagatgattccaagtttagggttcattgaacaaagaaagcggcggtggcttagggttttagcatatcaaaaacatagaaaggaggaagtaggtaggcatggtgaagctcaccgccgacttgatttggaagtgtcctcacttcttcaatgccctcaagaagcgagaattggatctttgaggtgctggttcgcccttctttcgctgcaaccctaaccctcatcataataatgttctcaaaattccctttctttcctttttcccctttcaggtaacaaaattgttgtaatcgaaaac

SEQ ID NO: 48426 - DNA, 236 bp, Gossypium hirsutum
  unsure (1)..(236): unsure at all n locations; Clone ID: LIB3196-052-P1-M1-A3
tatataacaagnatgtacaaaaaagcaggctggtaccggtcccctattcccgttatcgcggagtaccccactcgctcctgagaccactgtgcccgaccggagtgctacatctgacgccgatttctcccataaaggcgaccgcatgattcgtgcattacaacggctaccacttttaacgggggagaaccacatgcgcgccttcacctagaaccttggtttaaagacaaccgatttca

SEQ ID NO: 48427 - DNA, 410 bp, Gossypium hirsutum
  Clone ID: LIB3196-052-P1-M1-A4
atggagattgctcagaggagccgggctgaggccgagtcctggtaccagaccaagtacgaggagctgcagatcacagcgggcagacatggggatgacctgcgcaacaccaagcaggagattgctgagatcaaccgcatgatccagaggctgagatctgagatcgaccacgtcaagaagcagtgtgccagcctgcaggccgccattgctgatgctgagcagcgtggggaaatggcactcaaggatgccaagaacaagctggaagggctggaggatgccctgcagaaggccaagcaggacctggcccggctgctgaaggagtaccaggagttgatgaacgtgaagctggccctggacgtggagattgccacctaccgcaagctgctggagggcgaggagtgcatgctgaatgg

SEQ ID NO: 48428 - DNA, 404 bp, Gossypium hirsutum
  Clone ID: LIB3196-052-P1-M1-A5
atagcagctcgcccctctttcccacatatccgtccaggtgagatccggccccaccgagacccgctccccgctctggacggaggatcccaactgggtccggggctccccctccgcgcctccgcccgctgttgcatcatctggttcccaggacccccgacgcacccgcgcccacgcctgaggtcttggccgcccagaagctgggagttcgggcgtccaagtggccccgggctcccaccccagcccccgcgccggcggagcggaccccactggcggcgagtcccggagcgtggagcggtgacgcgggctgggaatctgggggagacgcacgcttcgtgcccagcattgagttttcgctgcattgtggatgggaaatgactgtttgcaaatcgccctttttcggcgac

SEQ ID NO: 48429 - DNA, 332 bp, Gossypium hirsutum
  Clone ID: LIB3196-052-P1-M1-B1
gcaacagcatctgccgaaaaagatggtttcggggtcagggatctgcgccaaaagggtggtggtagatgcaaggcatcacatgttgggaaggttagcgtcgatattggctaaggaattgttgaatgggcaaaaagttgtggttgtaagatgcgaagaaatttgcatgtctggtggattggtgaggcagaaaatgaagtacatgaggttcttgaggaagcgtatgaacactaaaccttctcatggtcctatccattttcgtgctcctgctaagatcctatggcgtaccattcgtggaatgattcctcataagactaagcgcggagcaacaacac

SEQ ID NO: 48430 - DNA, 275 bp, Gossypium hirsutum
  Clone ID: LIB3196-052-P1-M1-B10
atagggaaagctggagcggctcgcctgccgtaccggtactcggaatttccgggccagacccacccgtacctccctgcctaatatgtagaggccggccatgctatgggtggaaacatgtctccaacatgctatgctagtggtggatgttcagaaaaataacatagtgagcgtggcgattaaataatgaaaggaagggtggtgtaaaaaaaattataacatgggctgatccatacccacatgttgccgtgaattgtggtttgacaaccctaaggaag

SEQ ID NO: 48431 - DNA, 308 bp, Gossypium hirsutum
  Clone ID: LIB3196-052-P1-M1-B11
cgatcggatcccggagcgtgccttggcagcatatcgggggtggctttcgcaaagctcagcgtaccattatgtaccgcctcactaactccatgatctatgcacggcctgaacaacggccagaagctgatgactgttcgcatcgtcaagcatgcctactagatcatacacctgctcacatgggagaaccctctgtctgggctgttcaactccatcatcatcagtggttccaggcaggtcttcacccgcattggacgttccttgactgtaagacgacagtttgtggacatgtctccactgtacttcgtgat

SEQ ID NO: 48432 - DNA, 336 bp, Gossypium hirsutum
  Clone ID: LIB3196-052-P1-M1-B12
tggagactgttcacatgactgggtccttaacagcatgcgggggcgaggccacagacctggagctggctatttcacagctgcacaattaggcacgctggagcacctgctggctggcgttgggacccatcaaccgctttggccatactcttcaaattgctatcgcacaagctaggactgagtgcgccggcctggctgaccaatacgcatactctgcacgtggggcaggagaccctctaagagctcccaccaacaagccctgaggagcaatggctgcacttcagctcgccaagctggacccgccccgtctgctgaaggagtgcgctgaccatacaaatg

SEQ ID NO: 48433 - DNA, 318 bp, Gossypium hirsutum
  Clone ID: LIB3196-052-P1-M1-B2
attataaggatagctgctcttatacattagacaaaattctgctacagactcctgacacagctacatatgtgccaatttctgggtgtaattgcaacaacatacgtaggacccaagtgctaacattccttaactcaagggatggaatgtcacaccaaatgatggctatgccagtggaaccacactgctttaggctctggactccattctaccaccaactggtgcatatgacaaggccttgcgcctggcttttcaggatgtgtacaaaattggtggtattggtactgttcccgttggccgagtggagactgattttctcaa

SEQ ID NO: 48434 - DNA, 383 bp, Gossypium hirsutum
  Clone ID: LIB3196-052-P1-M1-B4
ggaacttgcggcggttattcttgaacctgttgttgtgaactctggcttcattccgcctaaacctgacttccttgaggctctacaacgcttaaccaaggcaaatggcactctcctcatatttgatgaagtgatgactggatttcgcttgtcctatggcggggcacaggaatattttgggattactcctgatttaacaaccctagggaagataattggtggtggtcttcctgttggtgcatatggaggaaggagggagatcatggagatggtggcaccagcagggccaatgtaccaggctgggaccttgagtgggaacccattggcgatgacagccgggatacagacccttaagcggttgaaagagccaggaacatacgaatact

SEQ ID NO: 48435 - DNA, 208 bp, Gossypium hirsutum
  Clone ID: LIB3196-052-P1-M1-B5
tacttacaaatacacaatgtactatccaggtgaggtgacaggcgcctgcatgtgaattcactggcacctactttaccaactactcgaattactgaggcatgatattgttgttaaccctctccgcttaacttgtaaagagctgagatgcatccattggactctatcctgggtgcaagagtcagatttggtttcaaaaaaaattaacaca

SEQ ID NO: 48436 - DNA, 249 bp, Gossypium hirsutum
  Clone ID: LIB3196-052-P1-M1-B6
atgccaagtacctccctcacaacgcacggcggtatgccgccgggcgcttccgcaaagctcagtgccccattgtggagcgcctcaccaacttcatgatgatgcacggccccaacaacggcatgaagctgatgactgtgcgcatcgtcaagcatgccttcgagatcatacacctgctcacaggcgagaaccctctgcaggtcctggtgtacgccatcatcaacagtgggtcacgggaggactccaccccca

SEQ ID NO: 48437 - DNA, 255 bp, Gossypium hirsutum
  Clone ID: LIB3196-052-P1-M1-B7
atcctgctctcaccatgagcctacgcctgcagagctcctgcgccagctatggaggtggttttgggggtggctcttgccagctgggaggaggccgccgtgtctctagctgttcaactccgtttgtctctgggggatcagctggaggctaccgaggcggcgtgacctgtggctttggtggaggggcttgtagtgactttggaggtggctacagaggtggccttggaggtggctttggtgggggttatgctggtggct

SEQ ID NO: 48438 - DNA, 130 bp, Gossypium hirsutum
  Clone ID: LIB3196-052-P1-M1-B9
acccacatattatcgacattttagctctcatgacatgattcaggcagtactttgtatcagccaagtcatcagtgatgttactgacgccgatcttaaacaaacattgctttactagcgttcaaaacaattc

SEQ ID NO: 48439 - DNA, 325 bp, Gossypium hirsutum
  Clone ID: LIB3196-052-P1-M1-C1
atacccaggctgccctgaaggtcctcgcccagaaagccagggaggctcagcctcctgttgccaggacccagcgttcacgtggggctgacagtgctgtgggaacgctccctgcaacgtgtccccagagtacccccgtccaggccaaagggaccaacaagctcagaaaacctaagcttcctgagggccagcaggccaccaaagcccctgggagctcatatgacagtgaggacagcagcaacagctcttcatggagcgaggaagatgctgaagggccccaggtggccaagtcggtccacacgctggtaggtcccacccccttcaggac

SEQ ID NO: 48440 - DNA, 376 bp, Gossypium hirsutum
  Clone ID: LIB3196-052-P1-M1-C10
ccccgatttccgcgttggagaccgctcacacgcgccggcctgaagcctcaaggggggtcctgaccgattattaggaactgattttggcaattggtttacaattaaatgtcccgctgcacacgaataatgtatcccatgagaccatcccaaggaacccttttttgccaactgctatataccatttaaagaaacacatggcctgccttccaggcttaataacggatgctgtgcctcgctcggaaattgcacttagggatgctgagatcactctggctggtccatatgctgccatgcaaattgactctcttgacctggcccacctgctgaaggactgccaggtgttattggacgtgaatctggccctgggcgggttgat

SEQ ID NO: 48441 - DNA, 379 bp, Gossypium hirsutum
  Clone ID: LIB3196-052-P1-M1-C11
gaaaatttaccttgtcaccaacggaagaggaacgcttacgttcttgacacatgaaaacaaagagtcctacaatatagtaccgggagttgtagtcaaagtcccagcaggaagcactgtgtacttggctaaccaagacaacaaggaaaagctaatcatagcagtgcttcaccgccctgttaataaccctggacaattcgaggaattcttcccagctggaagccaacgccctcagtcatatctccgagcctttagtcgtgaaattcttgagcctgccttcaatacacgaagtgagcagctagacgagctgtttggtgggaggcaaagccgtcgaaggcagcatggacagggaatgttccgtatagccagtcaggaacaaatt

SEQ ID NO: 48442 - DNA, 396 bp, Gossypium hirsutum
  Clone ID: LIB3196-052-P1-M1-C12
atgaggaaagcatgatgggagccacgaagggactgtgtattttaaatgcaggcacccaacaggaggatcctttattcgtccgaataaggtaaattttggaacagactttcttactgcaattaagaaccgctatgtgttagaagatggaccagaggaagatagaaaagaacaaattgttacacttggaaataaacctgtggagactgttggttttgactctcttatgaaacagcaaagtcagctgagcaagttgcaagaagtttctctgaggaactgtgcagtaagttgtgctggtgaaaaaggaggagttgccgaagcatgtcctaatattagaagggtagatttgtcaaaaaacctgttgtcatcatgggatgaagtgatccacattgctgatca

SEQ ID NO: 48443 - DNA, 356 bp, Gossypium hirsutum
  Clone ID: LIB3196-052-P1-M1-C2
ccgggatcctacctggacaaggtgcgtgctcttgatgagggcgggggccacctggaggtggagatacccgactggttccacaggcagctgggcattgagatcaaagactacagggcctacttcaagaccatcgaggacctgtggaacaagatcattgcagacaccattgagaatgcgcagtccattttgcagattgacaatgccaggctggcagccgatgactctcaggacagagtacgagcacgcactggccctgcggcagaccccagaggccgctgtcgatggcctgcgcccggtgttggatgaactgaccctggcccggactgacctggagatgcagatcgaaggccttaaag

SEQ ID NO: 48444 - DNA, 300 bp, Gossypium hirsutum
  Clone ID: LIB3196-052-P1-M1-C3
ggtgggatagctttttataagccaagggtcaataaatggattgataaatcagaggtgagactttgagcctagatctcgaaattcaagtccttctgtctacttgcttcaccatcggaaattgtaaatcaaaaaagaaaatatactttataggtatagacttattatattaatttttgtcgtcaaaatatttttaatgagataattgggatatgcaggcagacttttgaagaaaaaaaattatgattccaggtaaaagaaattggattgtgagaaaaatgaatttggttaaaatattaaacg

SEQ ID NO: 48445 - DNA, 399 bp, Gossypium hirsutum
  Clone ID: LIB3196-052-P1-M1-C4
atggagattgctcagaggagccgggctgaggccgagtcctggtaccagaccaagtacgaggagctgcagatcacagcgggcagacatggggatgacctgcgcaacaccaagcaggagattgctgagatcaaccgcatgatccagaggctgagatctgagatcgaccacgtcaagaagcagtgtgccagcctgcaggccgccattgctgatgctgagcagcgtggggaaatggcactcaaggatgccaagaacaagctggaagggctggaggatgccctgcagaaggccaagcaggacctggcccggctgctgaaggagtaccaggagttgatgaacgtgaagctggccctggacgtggagattgccacctaccgcaagctgctggagggcgaggagtgc

SEQ ID NO: 48446 - DNA, 377 bp, Gossypium hirsutum
  Clone ID: LIB3196-052-P1-M1-C5
ggtttacctagagtttcaagtgctgtggtcagtgattattcaaaaaagattgaggaaattgcttcagaattaactgccccactgcccgagattaaggtatcccaggagcccatcacaagaaactcttttaagcagagtcctaaatcggattcagaaaaccacatgccttcctctccaggattaagaaggagagttgtgcctgcctcgaacatcaaagatagaactcatgaaatcactgaggctgatgcatctgcacctatcaaactagatgctgcagcagaagcacacatacagaagcacagaaagcttcaagaggatttaactgatgagatggttggattggcacagcaacttaaagagcgtagtctcatgatgag

SEQ ID NO: 48447 - DNA, 374 bp, Gossypium hirsutum
  Clone ID: LIB3196-052-P1-M1-C6
gacccacgcgtccggtttttgctttgaatctttgcagaggggcttcgagcaacaatggttatctttaacattttcaaaggcaatatttcttggtaatggtcttgttgccattttggctgggttgtttggaaacgtgctcgttgattcattatcccttggacctgtggctccttttgatgctgctgcgatctttcttgccattgggatggccattattttatcatcatggaccgaaaatttcggagatccttcagaaaataaggacttgctgacccagttcaggggcgctgctgtagcaatagcttcggatgaaaaaattgctttgctgggtgcaatacagtctctgttcgaaggttcaatgtacacatttgtgt

SEQ ID NO: 48448 - DNA, 310 bp, Gossypium hirsutum
  Clone ID: LIB3196-052-P1-M1-C7
agtgcactgacctctagtaacaagcataaacaaaagaggtgccggtcccggattccaattatacccatgactaacctgcatgtaaaaggccacaaagccagggggggtcaaccttctgtttccaggacccatccttcatgtccagatcacagagctttgggaacactctctacaacgagtccccacagtacacctcgccatgccaaaaagacctacacgctcagaaaacctattttacctgaggtcaaatgaggcaccaaaggcccggtaagctcagcatacactatgctcaggagcaacagatcttcac

SEQ ID NO: 48449 - DNA, 356 bp, Gossypium hirsutum
  Clone ID: LIB3196-052-P1-M1-C8
atcctacctggacaaggtgcgtgctctggaggaggccagcgccgacctggaggtgaagatccgcgactggtaccagaggcagcagcccagtgagatcaaagactacagtccctacttcaagaccatcgaggacctgaggaacaagatcattgcagccaccattgagaatgcgcagcccattttgcagattgacaatgccaggctggcagccgatgacttcaggacaaagtacgagcacgaactggccctgcggcagaccgtggaggccgatgtcaatggcctgcgccgggtgttggatgagctgaccctggccaggactgacctggagatgcagatcgaaggcctgaaggaggagc

SEQ ID NO: 48450 - DNA, 321 bp, Gossypium hirsutum
  Clone ID: LIB3196-052-P1-M1-C9
atggctagtaatatctcccctagagacctctcagacaggcagacaggcaagacagacaggcacccgatgctgctgtctcttgagctggggggacagctaagaggcactagagtctatcccaagggctccaagtgacaagccgagggactcccccagaggaacaggtagggacctgccctcagttaccctctgctcatggacacctctcttctttctcccaggatgactggtgtgccttcctcagcaggtaagagaacagccccatggagtggggggaggcggagttaggctcctgttcactggcccaataaaagtgggagc

SEQ ID NO: 48451 - DNA, 348 bp, Gossypium hirsutum
  Clone ID: LIB3196-052-P1-M1-D10
atcccgggtttggccaggccctgcgctcccctccggactggcaacccctggtccccttcctctttccacttgcattcgggggtgtctgctgttctgagaacatcagaactgggaagagaggtggagtcacatgcattcttggtgggcattattctaaacttttgtatccaagttcatcccccttcttccacggtggcattgtcgtactaaacagttcccccatgcgtgctgctgaagagctgctcaccggaggcaggcaacggccccggcactgccccttgcattaagtcatgtgtttgatgtgctcttgtgaatttactttgtcggaacagaatatttacatgtcgg

SEQ ID NO: 48452 - DNA, 381 bp, Gossypium hirsutum
  Clone ID: LIB3196-052-P1-M1-D11
gaatctcacaaaacagaaacaattcgcaccaatgtggctggaaccttgaccttagcagatgtttgcagagaacatgggcttttgatgatgaattttgctacagggtgtatattcgagtacgatgcaggacatcctgagggctccggcattgggtataaagaggaagacaaacccaatttcactggttccttctattcaaaaaccaaggctatggttgaagagctgttgaaagaatatgaaaacgtctgcactctcagagttcgaatgccgatctcatctgacctaaacaaccctcgtaactttattgccaagattgcacgctacaacaaggtggtcaacattcccaacagcatgacaatcttggatgaacttctgcctatt

SEQ ID NO: 48453 - DNA, 388 bp, Gossypium hirsutum
  Clone ID: LIB3196-052-P1-M1-D12
atgcgtatattagatattgttcctcctaccttctcagctctatgtcctgcaaacccaacctgcatttacaagtatggagatgaaagtagcaattctcttcctggacattctgttgccctctgtttagcagttgcctttaaaagtaaggcaaccaatgatgaaatcttcagcattctgaaagatgtaccaaatcccaaccaggatgatgatgacgatgaaggattcagttttaacccattgaaaatagaagtctttgtacagactctgctacacttggcagccaaatcattcagccactccttcagtgctcttgcaaagtttcatgaagtcttcaaaaccctagctgaaagtgatgaagggaagttacatgtgctaagagttatgtttg

SEQ ID NO: 48454 - DNA, 408 bp, Gossypium hirsutum
  Clone ID: LIB3196-052-P1-M1-D2
atggatttgatggcgtgatgtctcacagaaagttctcggctcccagacatgggtcgctcggcttcctgcctcggaagcgcagcagcaggcatcgcgggaaggttaagagcttccctaaagatgatccgtctaagccggtccacctcacagccttcctgggatacaaggctggcatgacccacatcgtgcgggaagtcgacaggccaggatctaaggtgaacaagaaggaggtggtggaggctgtaaccattgtggagacgccacccatggtggttgtgggcattgtgggctacgtggaaacccctcgaggcctccggaccttcaagactgtcttcgctgagcacatcagtgatgaatgcaagaggcgtttctataagaactggtgagggaggaggccctgcagtccct

SEQ ID NO: 48455 - DNA, 381 bp, Gossypium hirsutum
  Clone ID: LIB3196-052-P1-M1-D3
ggaaaaggaaaacgaagaaaatggcgtgcctctctgcccaaatccctctctgcttggccttaatgatggctgcctgtttgatgataggcatcaatggaagcatacatggagctcaaagggagttcgattactttgctttgtctcttcaatggcccggcaccatctgccacaagactcgccattgctgctcctccaatgcctgctgccgaggctcgaactctccaactgaatttaccattcatggattgtggccggattataatgatggaacctggccttcctgttgttaccgatctcagtttgatgtcaaagagatttcaacattgcttgatgcacttgagaagtactggccatcgttatattgtggcaaatcatcaacct

SEQ ID NO: 48456 - DNA, 378 bp, Gossypium hirsutum
  Clone ID: LIB3196-052-P1-M1-D4
cagaaaaaaagggtatatatttaaatattaaatcgacttgatatatggtttaaatatttgatatggtcttcttttttaagttttgattacatgggttacatattgttttaagcatctcatttgttcatgaagataaatattaacaaatttatttatgtcgctatagtagggtttataattaaataataaatttgattaaaacatatctagtatgcaaatttgtgttaataaaccaatgaattttatggttattcggatttgattcaattcaaagaattgttaaaggtagtagttcatacgttttatattattccatgtgtaaattatttacaaaaatgacatgagcaattgtaaatgaaaagttctatgagcatgaat

SEQ ID NO: 48457 - DNA, 395 bp, Gossypium hirsutum
  Clone ID: LIB3196-052-P1-M1-D6
atcgggttaggaggagctaggctgccatcggaccggtgcagatacggggttgctcttttgctcataagaggggcttcgctggcagtctgaagggcaacgcggtaaaaatactgctttggtgggcgacgcggtacaggtgccgaagagcgttcgttacgggaatgccgaagcgtgggaaaaagggagcggtggcagaagacggggatgagctcaagacagagccagagcccaagaagagtaagacgcccgcaaagaaaaatgacaaggaggcagcaggagagggcccagccctgtatgaggacccccccgatcagaaaacctcacccagtggcaaacctgccacactcaagatctgctcttggaacgtggatgggcttcgagcctggattaagaag

SEQ ID NO: 48458 - DNA, 306 bp, Gossypium hirsutum
  Clone ID: LIB3196-052-P1-M1-D7
ctatacggaaagctggcgcgccctcatgcaccggtcccgtattcgcgattcgagccaatctcctcgacaagatagagatgtatgtgggcctccacgaaagaccgactttcaccctgagcttctctcaattattcgcttgacgcagacaacaagctcttctatacaatctcctgcttaaagagaacacttcacagtcctccctcaatacaacactttcactacttacctctatctgaacatttcaggtcaatcatctatgggtgactacaaggtaccgggtgtgcacctctcatcctaattgacatc

SEQ ID NO: 48459 - DNA, 394 bp, Gossypium hirsutum
  Clone ID: LIB3196-052-P1-M1-D8
atgtcctactgatcataaaacttttgggtcactggtttgtgccttgctagccaaagtctcttaaatacacataggtgggccagagaacattggacagatcaagagagattagaacatctggtttctctagttgcagtattggacaaagagcatagtcccagccctcaggtgtttttgacactaccaagtagttctgggttgaccctctgtgcagtggaattggtgattctgaattgtgctttactgatggtgctgagttgctctgtccctattatttgacctacgttttctcctaatgaaggtgttcatttgccgttcatgtcctgttatacttcacctccaggaactgtcatggatgtccaaatggctttgcagaagggaaatgagatgacag

SEQ ID NO: 48460 - DNA, 276 bp, Gossypium hirsutum
  Clone ID: LIB3196-052-P1-M1-E1
cggacgcgtgggtaaggaaggaatcccaccagaccagcagaggctgatttttgctgggaagcaacttgaagatgggaggacccttgcagattacaacatccagaaggaatccactttgcacctggtccttcgcctccgcggtggttttaagtgttgtgccgaacacctgtccagttattgttgatgtgttaagtttgttatgtttgtgggtcgtatgctgatgtgagctggccactaggcaggggaagcttacaagtaaaaataattgctttttat

SEQ ID NO: 48461 - DNA, 372 bp, Gossypium hirsutum
  Clone ID: LIB3196-052-P1-M1-E10
cattcctggcattaatggacctagtgagggagttcccagagttcttgcatgctttagtaataatctcctacgtcgcgaaccacttaagctcgtggatggtggcgaatctcaaataacttttatatacataaaggatgctattgaagctggtctctcgatgattgaaaatgcagatagggccaatggccatattttcaatgtgggtaacccggacaatgaagtcacagttaggcaacttgctgaaatgatgactaacgtctatgccaaggttagtggagaaactgcgctggagtcttcaacagttgatgtcatctccaaggaattttatcgagagggttatgatgatagtgacaagagaattccagacatgac

SEQ ID NO: 48462 - DNA, 398 bp, Gossypium hirsutum
  Clone ID: LIB3196-052-P1-M1-E11
atgaaatattcacatttctgttatttcttgtttttaagctctgaattattccagttttctgtcctgcatgctttcaacagtgtgcttttacagaggcagtttatcacagtgaatgtccctgccccacactccatatggtcctgttgtcctgaaaatacactccaggtagcacagacttgttattttgcctggctggttacacacatgctgtcttgctttgctgctcagccgcctccctctgaggccaacttaggccaacctacctgggactccatctgaagtcagacgccagagaaactgagtggtgaccacgggtctgcttttctctctgatcctaggggacttgttgacatgggagtatctgttcccacatggaaggatgtgtgtttctctctcat

SEQ ID NO: 48463 - DNA, 71 bp, Gossypium hirsutum
  Clone ID: LIB3196-052-P1-M1-E12
ctaaaattaattgatcacaaaatttgtgaaaataatcaaatagtgtgatgtgacaattaatctaattaact

SEQ ID NO: 48464 - DNA, 392 bp, Gossypium hirsutum
  Clone ID: LIB3196-052-P1-M1-E3
atctcgtagtcgatgcatgtcccagacatgacttacactgtcttacgtctcaaggtcgaagcatgtcccagacatggtcttacactagctctcaaaatgtggctgatgcattagttcacacaagtgacccaaacgtcacggcatgaatatctgatttatttcctaaggttcaataaggaattctactatctctattctcatcacattttctcatttccacaatcaagaaatttatgctataataattttagtacaattcaaatacatatattatttatgtagttgtactatttacatacaacttaccttggattacaaaatgtggcgactagtcaatttagtcgatttgcttagctttccttcggtacaggttcagattcggtatttcttaa

SEQ ID NO: 48465 - DNA, 384 bp, Gossypium hirsutum
  Clone ID: LIB3196-052-P1-M1-E4
ttatttttgagacagaaaagcacaatggtattgctgaattgcttgaaatcttgggcagcataataaatgggtttgctttgccgttgaaggaagagcacaagctcttcttggtccgagcgctcattcctcttcacaagcctaagtgtgtgtctatgtaccatcagcaactttcttattgcattactcagtttgttgagaaagacttcaagttggctgataccgtcatcagaggccttctaaagtattggcctgtaactaatagttcaaaggaggtaatgttccttggagagttggaagaagttcttgaagctactcagacagcagaattccaacgctgcatggttcctcttttccgacagattggccgatgcctcaacagcttgc

SEQ ID NO: 48466 - DNA, 395 bp, Gossypium hirsutum
  Clone ID: LIB3196-052-P1-M1-E5
atgccgcggcgggagttgagcgcgcagccttgtttagcccaggcgccggcagccatggcggtggaaggaggaatgaaatgtgtgaagttcttgctctacgtcctcctgctggccttttgcgcctgtgcagtgggactgattgctgtgggtgtcggggcacagcttgtcctgagtcagaccataatccagggggctacccctggctctctgttgcctgtggtcatcatcgcagtgggtgtcttcctcttcctcgtggcctttgtgggctgctgcggggcctgcaaggagaactattgtcttatgatcacgtttgccatctttctgtctcttatcatgtttttggaggtggccgcagccattgctggctatttttttacagataaagtgatgtcaga

SEQ ID NO: 48467 - DNA, 338 bp, Gossypium hirsutum
  Clone ID: LIB3196-052-P1-M1-E6
gctttgttgtatctcaatgtatatggcctcacacctatgaataactacctttactggtttgggattgggatattccactcgggtatagaagtacatggtttggagtacggatttggagcgcatgagtaccctacaagtggggtgtttgaagtggaaccaagaagttgtcccggcttcatcttcagaagatcaatattattgggcagcactaacttgtctacgtcagaactggggaaacttatggagcacccttctcagaaataccatggggacacgcaccatttaatggctgagaattgcaaccatgtcaccaatgaagtgtgcatgcaactaactgg

SEQ ID NO: 48468 - DNA, 388 bp, Gossypium hirsutum
  Clone ID: LIB3196-052-P1-M1-E7
aatcaacaatggcaaagctcgcagtttacttagccaccctggctctcattttgttccttgccaatgcttcaatcacatctgtgacggtcgaaagcgaggaaaaccgggatagctgtgaacagcagataaggaagcaagcccacctgaagcactgccagaagtacatggaggaagagtggggtggcgaaggcagcgacaatatagccggcgggtacattgactcatgttgccagcagctagagaagatggatacgcaatgcagatgtcaaggtctaagacatgcaacgatgcaacagatgcaacagatgcaagaacaaatggggagcaaacagatgcgagagatcatgcaaaaggttaccaagaatataatgtccgaatgtgagatgga

SEQ ID NO: 48469 - DNA, 361 bp, Gossypium hirsutum
  Clone ID: LIB3196-052-P1-M1-E8
gaagaatagctacatgatagggaagagaaatgagaggatgaggaggagaaaaggaaactaacgatatggattatgaggaggaacattgaacattttataattctatttttaaaagacttgtattaatttttggaagattttaatttaaactttgtagctgtaggattaacagtagattcttagttattctgcctttcgtttaagttttctatgtaggagcccaacatgaaggagaaagaaacaatttgagctttacaggatcaaatgaagaagcacccatcatttgcagttgacgcgacaatgatgaattgggaaatttgtttcctatatttttttatgggcttcacatttgaggacaata

SEQ ID NO: 48470 - DNA, 399 bp, Gossypium hirsutum
  Clone ID: LIB3196-052-P1-M1-E9
atgtagtttaggttttctttgttgtagtttgggtttgggtgtgtttttaggacaccttgttagtggttctttctgttttcagaattcttaggtaacagacattaaccaaagatgcctgtgaacctaacaggcagatcataggaccccatgactgatgtttactctttttaaaaactaaaccagactgcactctgtgcattcccagctggtatttgcatgggggtgtgatgggggggtctaagctgagaggaaaacacacaggtctctcagcatttttaggcagtcacactttccagccgatctttttcatttgtaacaggaaccattgggaggtgtagggttggattcagtggtaggttgtgatggggttttttttttttcatggtggtttaacctacc

SEQ ID NO: 48471 - DNA, 408 bp, Gossypium hirsutum
  Clone ID: LIB3196-052-P1-M1-F1
atctcagatgtcaatacctgcgcagaatgtgcaataaaataatgaactccaggattttaaaccttgggtgtggacactgtcccttctttctctgccccatgatagcatcagagtaatcttactctaaaaggaggttaagaaacaacaaggctttaggaatcatgtcgtttgaggacccccattttataaggagggaaccaaaatgtagaaatgagtgagcaattgccaaggtaattcccagagccaggatggggctcaagtctcctggtatgtggctcggggttctttcctattccaatgtgcttcctaagaaatgacaatgtattctgttcactgctggttgtcaccccagtctgaccacggcttctaagagacttggagtggaggaagggggaagaaacaaacacc

SEQ ID NO: 48472 - DNA, 403 bp, Gossypium hirsutum
  Clone ID: LIB3196-052-P1-M1-F11
atacggcaatgaaagcagctttccagtcacagtacaagagtcactttgttgcagccagtttaagtaatcagaaggctggaagctctgctgctggggcaagtgggtggactagcgcagggagcttgaattctgttccaactaactcagcacaacagggccataacagtcctgacagccctgttgccagtgccaccaagggcattccaggctttggcaatactggcaacatcagtggtgcccctgtgacctacccatctgctggagcccagggagtcaacaacacagcttcagggaataacagccgagaagggactgggggcggcaacgggaaaagagagagatatgagaaccggtgcagcagccgtcacattcacggagagactggcaatcggcatagcgatgg

SEQ ID NO: 48473 - DNA, 404 bp, Gossypium hirsutum
  Clone ID: LIB3196-052-P1-M1-F12
atcccaggccctgtggggctggcagatgagtaagcaggcaggctgggtgcacccatccctccccttcccctcccctaccctcccttctaccccccatccactgtccgccagcacagtgcattcatgcagctgggtcccgccccgtctccagaggcacctcctgctagcaacagtctccccaggcacgacacagctaacagaaggccgggcaggcaggactctgggacagacgcaggccagctgcccagagagcccagacccagcatggacgctgtggacgccaccatggagaaactccgggcgcagtgcctgtcccgcggtgcctcgggcatccagggcctggccaggtttttccgccaactagaccgggacgggagcagatccctggatgctgacgagttcgg

SEQ ID NO: 48474 - DNA, 387 bp, Gossypium hirsutum
  Clone ID: LIB3196-052-P1-M1-F3
gtcaactggcaaagtttctctgtctggtcgctctctctattggtgaagttcataagcttttgtatcaatggctgaagtccgtgaccgcaacctgccgcaccaagttcaagttcacccacagtaccgtttcgacaatacaaccggaggctgttactgtgcacagaactatcacagtggaccatcaacaagccaagttctagccgtccttacacttctccccattggtggtacactgcttgcattagccgggttaacactggccggcaccgtcattgggctgatgctagccacaccgctgttcatcatcttcagcccagttcttgtcccagctgccattgccattgccatggcagggacggggttcttgtcgtccggggcgtttgggtt

SEQ ID NO: 48475 - DNA, 168 bp, Gossypium hirsutum
  Clone ID: LIB3196-052-P1-M1-F4
atggatatttgtttttgtccttttaaaaatcatattagggtcaggtgaggtggctcatgcttgtaatctcagcactttgagaggccgaggtgagtggatcacctgaagtcaggagttcaagaccagcttgatcaacatggtgaaaccctatgtctactaataatacaa

SEQ ID NO: 48476 - DNA, 403 bp, Gossypium hirsutum
  Clone ID: LIB3196-052-P1-M1-F5
atgtgcctcagggggtcccctgaaactaattttctattggtgggattccctggattcattatatgaaatggtgacatgattagaggaaattcttttgtagtatgaaaattgtcccttttcttcttcagtacttgcctccttactggcattgaattatcacagggacaaaatctggtaaattttttatttctaactctcccatcaaacccctgttgcccagtatttatttggtggccttcacccaccggagggaaaaaatgagcttattcaagctgccaatgtttatctatgggctgtagcagtacatggaactgtactgtgccagggatattgagatgctctgggggtgtattgtatacctgccagttttcttcatttctgaattgaggtttcttttcttgat

SEQ ID NO: 48477 - DNA, 399 bp, Gossypium hirsutum
  unsure (1)..(399): unsure at all n locations; Clone ID: LIB3196-052-P1-M1-F6
atgtggggcacatctaacttaactgtgaaaagacacatgacacaatcaccttgctgctgattacacggcctggggtctctgacttctccccttaccctcccgcctcccaccctccctgcaacaacagccctctagcctggggggcttgttagagtagatgtgaaggtttcaggtcgcagcctgtgggactactgctaggtgtgtggggtgcttcgcctgcacccctggtttctttaagtcttaaatgatgccccttccaagccatcatcctattcccacactcctccactcccacccttggccgaagcatagattgtaacccctccgctcccctctgagattggccttcggtgaggaattcanggctttccccatatcttctctcccccacctttatcg

SEQ ID NO: 48478 - DNA, 375 bp, Gossypium hirsutum
  Clone ID: LIB3196-052-P1-M1-F7
cccacgcgtccgccgatggggcggaattggggacaaaattggcatataaattctgatctaaggaatcaaccactttcatttgaggtcactaatagtgatggtcttacacttacatcttacaatgttgctcctaaaaattggaactttggccaaacttttgaaggaaagcaattcgaggtctaagatgaaagaaaagcatcatcatcaacacaatgtaatgttgggtattatttattttatatatatagaccagactgtcctattcttttctttctttttgtttatctggtgttttgtactgattggggatggaaatggaagggtagaattggcgacttttttattgtgtgtaaggacttaaaatagcaggatata

SEQ ID NO: 48479 - DNA, 276 bp, Gossypium hirsutum
  Clone ID: LIB3196-052-P1-M1-F8
gagggcttgcacatgtgtggcgggcaacttggcgtggggtctcgaattattacatggacaatgggtgttgcactgttagaagctgcgaaatcattttcaagcatactagcgctctcctggatatcaaatactgcaggccaagatctgatccaatgatccttattgccattcttttaatggcttagggtcaggttggtggtgcgtcatcatgtcttcataatcggatgccaatattttttcggaggttatataatgctgtcgggcggtataacattg

SEQ ID NO: 48480 - DNA, 388 bp, Gossypium hirsutum
  Clone ID: LIB3196-052-P1-M1-F9
ggaaccgcttccatcagcttagattacaaacatgggccatacccaagtacggaatacagtaccgcttgaaatggcaaaaggaatccgtcaataacatgattgaggaagctgtattagaggctgaggaaaaaggtgctagtgtgttgagtctaggcctcatgaatcagggtgaagagctaaacaggtacggtgaggtctatgtgaagaagcatcctcagttgaaagtgaagttagtggatgggagtagcttggcagttgcagttcttctaaatagcataccaaagggaacaacccaagtactccttagaggccacttgactaaagttgcttttgcagttgcctttgccctatgccaaaagggcattcaggtcactatattgcgtgaggg

SEQ ID NO: 48481 - DNA, 382 bp, Gossypium hirsutum
  Clone ID: LIB3196-052-P1-M1-G10
ggacaagaaaaaaattgttaaaaaaaaaaagaaccctctgcagccatggctgagcatcaccagcaattgcgccgaactgatgacatgaagaatttcttccatgaaaatggaccctcaacatcaaaagttcttatggttgccaccctccttcctgttggtggcatcctcctcttgcttgctggtttgagccttattggatccctcataggtcttgctattgccgccccacttttccttattttcagccctgttttggtacctgctgcttttctcattgcgggttccatagccggattcttgacctccggagcatttgggatcactggactgtcatcgctgtcgtggattgctacttatattcgtggaagcaggggctctatgt

SEQ ID NO: 48482 - DNA, 370 bp, Gossypium hirsutum
  Clone ID: LIB3196-052-P1-M1-G11
gcgcccacgcgtccgtattttcatttcagtgaaggacaagaaaaaaatttttaaaaaaaaaaagaaccctctgcagccatggctgagcatcaccagcaattgcgccgaactgatgacatgaagaatttcttccatgaaaatggaccctcaacatcaaaagttcttatggttgccaccctccttcctgttggtggcatcctcctcttgcttgctggtttgagccttattggatccctcataggtcttgctattgccgccccacttttccttattttcagccctgttttggtacctgctgcttttctcattgcgggttccatagccggattcttgacctccggagcatttgggatcactggactgtcatcgc

SEQ ID NO: 48483 - DNA, 385 bp, Gossypium hirsutum
  Clone ID: LIB3196-052-P1-M1-G12
cccaaacaatcccaaagagaaaaaaaaaaccacccatagccagaaagcaagccaaaaaaaatgtcagacgatgaaacagtggaagagtacttattcaaaatagtgataataggagattcagctgtcggtaaatccaacctcctttctcgattcgcacgaaacgagttcaacgctcactcaaaagaaaccattggagttgagtttcaaacccagagcgttgaaatcgacggaaaagaagttaaagctcagatttgggacactgcgggccaagaacgtttccgtgctgtaacttcggcttattacaggggtgctttcggtgctttgttggtttatgatattagccgaagagctacgttcgataacgttgctcggtggcttgatgagc

SEQ ID NO: 48484 - DNA, 249 bp, Gossypium hirsutum
  Clone ID: LIB3196-052-P1-M1-G2
acaaactagattatgatatgagttacgaatttttcataggccatccaaaattccataattctctaataacaaaatgaaaattaaaaggaaaaaagaaaaagaaaaatggcacattaaattcttattaaggatgaatgttgataagctttgtttgaaaataatgattttgatctgataacaccaatgtccctttccttggcattttattggggaagaccaagaatgcacgtcaaaaaagggtggcgggtt

SEQ ID NO: 48485 - DNA, 123 bp, Gossypium hirsutum
  Clone ID: LIB3196-052-P1-M1-G3
ttttttttttcctccttactggagtttgtgttgtattgaattatatacaatatgtgttcagtgaatcttgtaatcataatttctgaacttgttatgatctatgaaataaatccaactttttac

SEQ ID NO: 48486 - DNA, 387 bp, Gossypium hirsutum
  unsure (1)..(387): unsure at all n locations; Clone ID: LIB3196-052-P1-M1-G4
taatttccttttatttattggttgtttgttttctggtgctttctttctctatcctgaaaccacagccgtaaccatgtcttccttcctagccaacggcatttccagcttctcaccacagcctacttccgattcaaccaagttccttaaaggcttcttcccaaagctcgattccgtcaaatccataaccccaaaactccaaagttcaaggcttttgaaggtcagagcagatgttggtttcgatcctcaaactctcacgtcagatcccagctcttcatcaggtaaatcctacgatgacaaaatccaggaaattcttcgaaaccgtgattatgataagaagtttggctntactatggatatcgattcttttgcgatacccaaagggctttc

SEQ ID NO: 48487 - DNA, 351 bp, Gossypium hirsutum
  Clone ID: LIB3196-052-P1-M1-G5
cccgtttccttccggagtttttcgacggtcgctcggcttccaaaggccccagtctttacatttattacaggaactcaattataaagctattcagggaaaacccttcccgtaagattaccttcactgacgtcaggaagactcttgttggcgatgttggatccattcggagggttttcgatttccttgaccactggggtctcatcaattactctgcctcctctgctctttccaagccctccaaagatactggttctaatattaaatcctcagattccccttctgttgaatccacttcttctgctgcccccacctgcaaacactcctctaatttcaggcgaatctgcggggcgt

SEQ ID NO: 48488 - DNA, 377 bp, Gossypium hirsutum
  unsure (1)..(377): unsure at all n locations; Clone ID: LIB3196-052-P1-M1-G7
gaaaaccaaagtaaacaaacggaaaaataaaacaaaagcctattgctcccattcggccgaccccaggatccgcgcagtccaaccgccaccactgcgaacggtggagaaccacatgcgcgccctcacctagaacctcggcttaaagaccaccgatttcagccccagaaatcccaccccaagcttcgatttcggcgaagtggaaagggatttcgatggcccattcgcacaggtacggagcagaggacatgcgctggcccttggcgcgaggcgtacagggctgtgctggcgcgggtacgggggctgtgttggagggtatggaggtagctggcgtgggggctggggcttggctgnctggttgtggcgcaaaagtggggaag

SEQ ID NO: 48489 - DNA, 397 bp, Gossypium hirsutum
  Clone ID: LIB3196-052-P1-M1-G8
atggcttgggtggtggctttgctggtggtgatgggcttgtggtgggcagtgagaaggtgaccatgcagaacctcaacgaccgcctggcctcctacctggacaaggtgcgtgctctggaggaggccaacgccgacctggaggtgaagatccgtgactggtaccagaggcagcggcccgctgagatcaaagactacagtccctacttcaagaccattgaggacctgaggaacaagattctcacggccacagtggacaatgccaacgtccttctgcagattgacaatgcccgtctggccgcggatgacttccgcaccaagtatgagacagagctgaacctgcgcatgagtgtggaggccgacatcaatggcctgcgcagggtgcttgatgaactgaccct

SEQ ID NO: 48490 - DNA, 393 bp, Gossypium hirsutum
  Clone ID: LIB3196-052-P1-M1-H1
atcaaaattctaaagtgaaatcgaccacccaggttgtaataaaggaatatttgtcaaggtaaaaggaatagaaatgacttcacttatgttgctaatttgatttgaaactattaaatatttaaatacacgatatgtggttctgcagctgcactcttgctccaggcctgcaaaactcataaaataagggcaggacagacagactttatgtgtatctatatgaaagagaatttttgaaaaaagaaaacatcattagtacttctatgtaacatagtaaagtagatctacaatataccttgaaacataaaataaatgtgactattttaagtgttagagaaagatgcttttacatacagttacctgatttagtaagttactaagtgtggcagattgtgg

SEQ ID NO: 48491 - DNA, 254 bp, Gossypium hirsutum
  Clone ID: LIB3196-052-P1-M1-H10
tcgcccacgcgttcgcccaaacgcctcgctctaagaaaaaaacaattatggcaagcaaagaacccgaacacgagcacagagaagatgaagaagctcctggcgccgaggatgaagacactggagctcaagtcgaccctattgtcaagctagaggaagtcgctgtcagtacatgcgaggaaaatgaagatccgatcctcgatctgaagtcgaagctgtatcgatctgataaagaagggaatcaatggaaagagaga

SEQ ID NO: 48492 - DNA, 358 bp, Gossypium hirsutum
  Clone ID: LIB3196-052-P1-M1-H11
atccaatgttaagcacaacatttactctctgtaagcctccatttcttgactgtgaagtgggtctaccaatcacctgccggtcactgcaaggagtatatgagatgagccatattaccacttagcatggggcctggtgccagaaactagctactctcactgttggagggaaagtcatgatcattcttgcttttgaccatgccactgagtaggccatggcctgggagaaatcacttttcctcccaagcttccttttttttcccccctggtgaaatgagtgatcttgacagcatcacctataaggatccctgcagtgtctacaactcgatgactttggttggatcacttttaggtagtcgag

SEQ ID NO: 48493 - DNA, 390 bp, Gossypium hirsutum
  Clone ID: LIB3196-052-P1-M1-H4
cggacgcgtgggggtcataaccgtaccccagaatcatgcagtggtgaaaaaagcaggaaggcgagggtttgaatggatagcattcaagacaaatgccaatgctaagattagtcagattgctggacgtgtctccattatgcgaggattgccggtggacgtgctggccaactcctttggtatatcccgggaggaggccatgaggttgaagcataacagacaggaggtgtcggtttttagcccaaggcaaggctcgcaacagtagatcaaacaactaatctaggtgtacgtacgtacgtaattgcatcaacaataaaacccagatcccaatatctggattcggaataaatatatatataaataaaataatatggccttaacaggcatgcaact

SEQ ID NO: 48494 - DNA, 410 bp, Gossypium hirsutum
  Clone ID: LIB3196-052-P1-M1-H5
atgctgtcagtgaggaaatggtggaaagacagattagctgggcataatgacggatctggagcaaagctattctgtgaggctgaatgatggacacttcatgccagtgctgggatttggcacttatgctcctgatcatactcccaaaagccaggctgctgaagccaccaaagtggctattgacgtaggcttccgccatattgattcagcgtacttataccaaaatgaggaggaggttggacaggccatttgggagaagattgctgatggtactgtcaagagagaggatatattctacactaccaagctttgggctactttccttcggccagaattggttcgcccagccctagaaagttcactgaagaaacttggactggattatgtagatctcttcattattcatgtaccat

SEQ ID NO: 48495 - DNA, 368 bp, Gossypium hirsutum
  Clone ID: LIB3196-052-P1-M1-H6
tttctccataccagcataaatgaacaatggcaaagctcgcagtctacttagccaccctggctctcattttgttccttgccaatgcttcaatcacatctgtgacggtcgaaagcgaggaaaaccgggatagctgtgaacagcagataaggaagcaagcccacctgaagcactgccagaagtacatggaggaagagtggggtggcgaaggcagcgacaatatatccggcgggtacattgactcatgttgccagcagctagagaagatggatacgcaatgcacatgtcaaggtctaagacatgcaacgatgcaacagatgcatcagatgcaagaacaaatggggagcaaacagatgcgagagatcatgcaa

SEQ ID NO: 48496 - DNA, 386 bp, Gossypium hirsutum
  Clone ID: LIB3196-052-P1-M1-H7
ggatcttgtaggattcccaagaaattcttcgatttcttccggaagcagatgattattcatccgcttctcacgttccgtgaatagccgggacattgaggaatatccagaaaggcacttagggaatcggtctgattctatctccgttcgttccgtttgaagaaaggaaggatcccaaagaatcgatctttcttttagttgttgaatctctctttgattgatcaatgtgtgatattccgaatcctcattactaatggaatcgaaacgatctctggattgatcagaagatcctttcaattggcgagaatccgttacttgaacgaaactagatcttgtggaatcatattgaatatttgacgatacattccgtaccttgctaaaaaatcgat

SEQ ID NO: 48497 - DNA, 378 bp, Gossypium hirsutum
  Clone ID: LIB3196-052-P1-M1-H9
cccacgcgtccgaagaattccagcaggaagcactgtgtacttggccaaccaagacaacagggaaaagctaaccatagcagtgctccaccgacctgtcaataaccctggacaattccagaaattcttccctgctggacaggaaaatcctcagtcatacttacgaatcttcagccgtgaaattcttgaggctgtcttcaatacacgaagtgagcagctagacgagctgtttggtgggaggcaaagccatcgaaggcagcagggacagggaatgttccgtaaagccagccaagaacaaataagggcattgagccaaggagctacttcaccaagggggaaaggtagcgagggatacgccttcaacttattgagccaaacccc

SEQ ID NO: 48498 - DNA, 221 bp, Gossypium hirsutum
  Clone ID: LIB3196-053-P1-M1-A1
cgaaaatttacacattctaaaagggaaacaaacaaatatacgcgcgtacagatcaccggatggcgagcggtgacgtggaggccgtggattttgaaccggaggacgatgacctcatggacgaggacgccgattttgatgtaagtacaattgcaactagggtctaggtctgaattctgaatgactgtcgccgcttctacctatctgtctgatgataagaagac

SEQ ID NO: 48499 - DNA, 387 bp, Gossypium hirsutum
  Clone ID: LIB3196-053-P1-M1-A10
atcacctccctgctcggcaccatgaccacctgcagtcgccagttcacctcctccagctccatgaagggctcctgcggcatcgggggcggcatcgggggcggctccagccgcatctcctccgtcctggctggagggtcctgccgcgcccccagcacctacggcgggggcctgtctgtctcctcctcccgcttctcctctgggggagcctgcgggctggggggcggctatggcggtggcttcagcagcagcagcagctttggtagtggcttcgggggaggatatggtgctggcttcggtgctggcttgggtgctggcttgggtggtggctttggtggtggctttgctggtggggatgggcttctggtgggcagtgagaaggtgaccatg

SEQ ID NO: 48500 - DNA, 398 bp, Gossypium hirsutum
  Clone ID: LIB3196-053-P1-M1-A11
gtcgaagcggaaacctttttcagtttcgtcttctctcctgtttaagttcaaaacccttgattattcgcaacttctacctaatattttctgatataataaaataattttatatgcgaaagatgggttcatcttcgtcggagacgaagctactgcaagaattgatcttatacgccgccagcgctgcccttagttgcttggtcctcttcgcggggctccgacacctcgacccaaaccgggaagcttctaaaaaggctttggagcacaagaaagaaattgccaagcgtttgggtcgtcctctaatcaatactaatccctacgaggatgtaatagcatgtgatgtcataaatcctgatcacattgacgtggaatttgagtctattggaggattagaagccatc

SEQ ID NO: 48501 - DNA, 394 bp, Gossypium hirsutum
  Clone ID: LIB3196-053-P1-M1-A12
gcaacaaactatcagatcagagtttcattgacaaccgagttgtggtggatggcaacctcattacaagcaggggtcctggaacttccatggagtttgcactaggaattgtcgagaagttttttggacgcccgaaagccttagagctagcaaaggtaatgctttttgtacactaatagatcagcaagtatgaatgcttgtcctcggttcttgctaccatagaacattctacgagatgatacatgggaatatcagaggtgagtttgcatttgactacagatttactttgcggtttatataccatagttggttgataaataaatgagactaggaacagttgaccaataagaacacccgggtttagctatgatgctttctttttaacttattatattta

SEQ ID NO: 48502 - DNA, 393 bp, Gossypium hirsutum
  Clone ID: LIB3196-053-P1-M1-A2
caaaattgttgatgatggaattcatgagctctttctggagtatgtagcacttccactgcctttgacaccaacttacacagaagaaggcaatgcgggaaacaatggaaagaccgatgaatcccaacaaggaaatcttctttcagaccagggacttacagatttcgatgtgtacattatggagactagcagccagcaaatgaaatctgagctggatcaatacttagaagagtccttgttgcctcgagtccaagagtttgatgtattaggctggtggaagctcaataagatgaagtatccaactctttcgaagatggctcgtgacattttgtcaattccagtatcagctgctgctccggactcggtctttgacatcataataaagcaactggatga

SEQ ID NO: 48503 - DNA, 425 bp, Gossypium hirsutum
  Clone ID: LIB3196-053-P1-M1-A3
atcagtcacaggcgagagccctgggatgcgccggccagaggccatgctgctgctgctcacgcttgccctcctggggggccccacctgggcagggagtaagtcggtggagtctgcccttaacctcctctgcctccctccaggagagccagggcctcacccggcccttgtcccagactaactctggtcacagaaccatcctgtctgcctggaggggcggggtcccctgttctggcagaggttgcccccatatcactgcatggggatttttttcccttttgctctcttttctgcagagatgtacggccctggaggaggcaagtatttcaccaccactgaagattacgaccatgaaattacagggctgcgggtgtctgtgggtcttctcctggtgaaaaggtgagtgaggccatgtccccacccatccc

SEQ ID NO: 48504 - DNA, 398 bp, Gossypium hirsutum
  Clone ID: LIB3196-053-P1-M1-A5
gcacgctctcatcattttccttctgctaccttctctcaacccaaacacatatttcccaggaaaaagaaaaagcttgagcgaacaagaaaatggccgatcagcttaccgacgatcagatctctgaattcaaggaggcctttagcctgttcgacaaggatggagatggttgcattactaccaaggagttgggaactgtgatgcgatcacttgggcagaaccccactgaggcagaactgcaagatatgattaatgaagtcgatgctgatggaaatgggaccattgattttcctgaattccttaacctgatggcaagaaaaatgaaggatacagactctgaggaggagcttaaagaggcattcagggtgtttgacaaggatcagaatgggttcatttctgca

SEQ ID NO: 48505 - DNA, 413 bp, Gossypium hirsutum
  Clone ID: LIB3196-053-P1-M1-A6
atgcggcagtggctggagaaggtcgtggagcagcacctggcctgcagggtgttccaagaatcagccatgtcatccctgtacccatctctagaagacctaaaagtggaccaggccattcaggcccaggccagagcctcgcccaagatgccagccctgccagtccaggcggcagccatttccccaccaccagttttgtacccaaacttggcagaattggaaaattatatgggtctttccctctccagccaagaagtccagcagagcctgcttcagattccggagggtgacagtacagcggtctcgggccccgcgcctggccagatggtggcaccggtgtccgggtacagcctgggcgtgcggcgagcagagatcaagcccgtggtgcgcgagatccacctgtgcaaggacgagcg

SEQ ID NO: 48506 - DNA, 404 bp, Gossypium hirsutum
  Clone ID: LIB3196-053-P1-M1-A7
cggacgcgtgggcttagactgaaatttctcaacggtttcaacttttttttcttttggtcatttgacaatctcaagctcaaatcaatcttaaaggaagcaaattaacttgaaggccaaatcaacttgattttgttgtaagtacaattcaactagggtttgttttgcattttgattgattttttttgtttctgatgatttgtctaaggggaattgaaatggattttgcaactgttcacgaggtgatcgattcattcttcgagtcaacttctcctctcaaagatttcgataaaatcatagacaaattgaatcagttcatccaatttgattcttcttcaggagaaggaaaagggagaagggttgaggagctgctaaaatgatgcccaaatcttaagaaaattattatt

SEQ ID NO: 48507 - DNA, 419 bp, Gossypium hirsutum
  Clone ID: LIB3196-053-P1-M1-A8
atcggccaggcacccctgcaacatggcctggaacaccaacctccgctggcggctgccgctcacctgcctgctcctgcaggtagctatggtgattctcttcggggtgttcgtgcgctacgacttcgatgccgacgcccactggtggacagagaggaagcacaagaacttgagcgaggtggagaacgaattctactatcgctacccgagcttccaggacgtgcacgtgatggtcttcgtgggcttcggcttcctcatgaccttcctgcagcgctacggcttcagcgctgtcggcttcaacttcctgctggcggccttcggcatccaatgggcgctgctcatgcagggctggttccacttcttagaaggccgctacatcgtcgtgggagtggagaatctcatcaacgctgacttctgcgtgg

SEQ ID NO: 48508 - DNA, 179 bp, Gossypium hirsutum
  Clone ID: LIB3196-053-P1-M1-B1
tcttgccctaggttctccggttaccttaaataaaaatgtgaaaaaaattttttttaaagttggactacatagacaagtccacaaaccatcaagcactcctccttaattatggcactagataaaataaacttcaaattaggaagtgtttcctaggaggaaaattccattagagagtgcca

SEQ ID NO: 48509 - DNA, 366 bp, Gossypium hirsutum
  Clone ID: LIB3196-053-P1-M1-B10
cagcaatatggtctggcaaagtcggcaaatgaagtgattttggtcattgaagcttacaaggcccttcgtgaccgagcaccttatcctccaaaccatgtggttggccatctaattgggagctttgctttcattgtctttgacaaatccacctccactttgtttgtggcttctgatcaatttggtaaggttcctctctattggggaatcaccgccgacggatatgtggcctttgctgataatgctgaattgctgaaaggtgcctgtggcaaatctcttgcttcttttcctcaaggctgtttctactccacagcagtaggaggattaagaagctatgagaatcctaagaacaagatcactgcagtgcct

SEQ ID NO: 48510 - DNA, 416 bp, Gossypium hirsutum
  Clone ID: LIB3196-053-P1-M1-B11
atctactacaagcgctgccgtgctgcccggtcctatgaggcagtggcggctgcagctgcctccgtgtataattacgcagagcagaccctgtcccagctgccacaagtccagaatacagccatggccagtcacctcacctccacctctctcgatccctacgatagacacctgttgccgacctcaggagctgctgccacagctgctgctgcagcagcagccgctgctgctgttactgcagcttccacttcatattacgggcgggatcggagccccctgcgtcgcgctacagccccagtccccactgttggagagggctacggttacgggcatgagagtgagttgtcccaagcttcagcagccgcgcggaattctctgtacgacatggcccggtatgagcgggagcagtatgccgatcg

SEQ ID NO: 48511 - DNA, 388 bp, Gossypium hirsutum
  unsure (1)..(388): unsure at all n locations; Clone ID: LIB3196-053-P1-M1-B2
ggaggaagttttggggttaggccctctctctgagtacgagaaagaagggttggagagcctcaaaccagaacttaaatcatctattgagaaggggatcaagttcgccaaccagaattaaacctgaactacttatgatttcttccattagcccaatccgaaattcttaaaaagttttttttttgtgttactgttgtatttcatgctgcaagcagcatcggctttactgaataggataggccctacataccatcaagttttcatgtnataattcccagtgacctgttacaaaggagggtttggttttaaaaaaaaaatctatttttccagtttaggtggggtgttccattcatttaactatataaattgtgaaatcacgtttgctctgggg

SEQ ID NO: 48512 - DNA, 218 bp, Gossypium hirsutum
  unsure (1)..(218): unsure at all n locations; Clone ID: LIB3196-053-P1-M1-B4
cccgacccggactgcagtcatgcggcagcgactggagaaggacgntntgcagtgcctgagggggaagatgtaccaagaatgatccatgtaacttacaaggcccttcgtggccgacctccttatgctccaaaccatgcaggcccacatcagattctgagctatgattctcattgtttccagcacaggcagcatccatttgctcgccaccagttatgaac

SEQ ID NO: 48513 - DNA, 391 bp, Gossypium hirsutum
  unsure (1)..(391): unsure at all n locations; Clone ID: LIB3196-053-P1-M1-B5
cggacgcgtggggtcatcctcgacatgaagttgcatctctgcgttccggttttgtctatgaaccaagaagatggcgttccaccaatgcttctgcatttgcatccatatcagcgttgcttgaaaagctccgaagggaaaaggatggcatcaaattggagaagaatggttgtaatattcatgaagattttaaaggaaaggacaatatggaggaggactcgaaacaaggccttgtcgtgaagagtccccgaacatctatactataacctctattattgaccgaacggctgcatcaaacatggttgaggcagaaccatacatcatgaagctgacggaggatcagataatgcagttactgtcaggtttctggatacagaccaatctntctgataat

SEQ ID NO: 48514 - DNA, 126 bp, Gossypium hirsutum
  Clone ID: LIB3196-053-P1-M1-B6
ctcctctttctctctattcgaaaggggaatactctctcattttacgatatttcttagtgtgttttggatcgggaggttagaggtttactatcaatggcggttactgtgacgatgtgcttttaagct

SEQ ID NO: 48515 - DNA, 408 bp, Gossypium hirsutum
  unsure (1)..(408): unsure at all n locations; Clone ID: LIB3196-053-P1-M1-B7
atcatgccctcagtttcacagataacataaataaaaattttaaaaaaattttttttcaagtttgactacatagtcaagtccacaaaccatcaagcactcctccttaattattgcactagataaaataaatttcaaattaggaagtgtttcctaggaggaaaattccattagagagtgacaataggatgaggtttcttcagggtaaactagcaacgcctgagcctgaatcttaatttggggtctcagttaaatctcctgtggagtcaaggattcttctnattctagtttgtgtttagtgatagatgtaatcttgacgaatattgcttactgggaagggtgaggaatatcacactcactttttcctttaccagtgtggttttgacttaagaaagccaaactttctaaagt

SEQ ID NO: 48516 - DNA, 377 bp, Gossypium hirsutum
  Clone ID: LIB3196-053-P1-M1-B8
atgccggtgagaagacagcgacatggcgcctccggcccccggcccggcgtccggcggctccggggaggtggatgagctgttcgacgtaaagaacgccttctacatcggcagctaccagcagtgcataaacgaggcgcagcgggtgaagctgtcaagcccggagagagacgtggagaaggacgtcttcctgtatagagcgtaccttgcgcagaggaagttcggcgtggttctggacgagatcaagccctcctcggcccccgagctccaggccgtgcgcatgttcgctgactacctcgcccacgagagccggagggacagcatcgtggccgagctggaccgagagatgagcaggagcgtggacgtgaccaacactacct

SEQ ID NO: 48517 - DNA, 419 bp, Gossypium hirsutum
  Clone ID: LIB3196-053-P1-M1-B9
atcttttggccaagtgtttccttgaccataagacactgtactatgacacagaccctttcctcttctacgtcatgacggagtatgactgtaagggcttccacatcgtgggctacttctccaaggagaaagaatcgacagaagactacaatgtggcctgcatcctaaccctgcctccctaccagcgccggggctacggcaagctgctgatcgagttcagctatgaactctccaaagtggaagggaaaacagggacccctgagaagcccctctcagaccttggcctcctatcctatcgaagttactggtcccagaccatcctggagatcctgatggggctgaagtcagagagcggggagaggccacagatcaccatcaatgagatcagtgaaatcaccagcatcaagaaggaggatgtcatc

SEQ ID NO: 48518 - DNA, 271 bp, Gossypium hirsutum
  Clone ID: LIB3196-053-P1-M1-C1
atcttttggccaagtgtttccttgaccataagacactgtactatgacacagaccctttcctcttctacgtcatgacggagtatgactgtaagggcttccacatcgtgggctacttcttcaaggagaaagaatcgacagaagactacaatgtggcctggatcctaaccctgccttcctaccagcgccggggctaccggaaggtgctgatcgaggtcaactatgaactcttcaaagtggaagggaaaacaaggacccctgagaagcccctttt

SEQ ID NO: 48519 - DNA, 333 bp, Gossypium hirsutum
  Clone ID: LIB3196-053-P1-M1-C10
ggaatatattaaggtcgtattaaaatttcattaaggaattttgatgtttgagtagataattgagtaaaaatgactaaattgcaaaaagtgtaaaagttgagttctattagttaaaacggtcaaatgactttagaaatgaaagttaatggacttgaatggtaattataccatatatgatgatagtggatgtgcatggataggttttaatgtaattagaatactttttaaaggttaattaagccatttgatgattaagtctaatgttaattaaacaaaagatgaaaaaacctatcatctgtttcattctcttattccttggctgaaatcaccatt

SEQ ID NO: 48520 - DNA, 398 bp, Gossypium hirsutum
  Clone ID: LIB3196-053-P1-M1-C11
ccattttaaatactttttatatatcatttgcttagaattgttttatattttattttagatttttttactttgtatttatttgttatttgtgattcatgattataacattttgtttataaattattactttgtgttgtatagtgctattccatcgcattttatttgttgaagttttaaagtcattttattcaaaagttttcaaaataaggcaatactcggtattttgcatcttcgagaaggttgtgccgtaacttactgggttccaattttcctcgttggatctaagtaaccgagtacccatttttttcaatcaaaacgcataagtttcaaataaaagcttattctcaagaattcgaggtgttgtgccctaactcactggatatgacattttgtatctt

SEQ ID NO: 48521 - DNA, 398 bp, Gossypium hirsutum
  Clone ID: LIB3196-053-P1-M1-C12
cagtgacactcaatagtttgtgaagaatcacaatagaaaatcgatggaaaaactttgcaacttcaatcaccaattcgtcattgttcatctgctactcttttcttcacttctaagcttcacaaatccaacaccatccccgacccaagatgaacaatcccaaatcatatcaaggttccaagaatacctccgaatcaacacatcccaaccatccccgaactataaaaaatcgacccaattcatcctatccttagccgaatccctttctttagaaacccaagtcatagagttcgtccaaggaaagccgctcgttatcctcaaatggccaggctccgaccttttccttccttctatcttactcaactcccacaccgatgtcatcccttctgagcgttcgaagt

SEQ ID NO: 48522 - DNA, 371 bp, Gossypium hirsutum
  Clone ID: LIB3196-053-P1-M1-C3
cccacgcgtccgcaggctctaaaggacttatacagacatctgacccctatacaacgtgtacacattgcccgacaccccaacagacctacattccttgatcatatatttagcattaccgataagtttgtggaacttcatggagatcgatcagggtatgatgatccagctattgttactggtataggaaccatcgatgataggcgatacatgtttatcggtcagcaaaagggtagaaacactaaagagaatattcaccgcaactttggaatgccaacgccccatggttacaggaaggctttacgcatgatgtattatgcagatcatcatgggttttctataggtacttttatcgacactcctggggcttatgc

SEQ ID NO: 48523 - DNA, 396 bp, Gossypium hirsutum
  unsure (1)..(396): unsure at all n locations; Clone ID: LIB3196-053-P1-M1-C4
attggagttgatgagagatccggtgatagtttcaacaggacagacttatgaccggagttcgataactaggtggatcgaggaagggcattgtacttgtccaaagacagggcaaatgcttgaccatacgcggcttgttccgaatcgagctttgaggaacttgatcgtgcaatggtgtactgctcatggtgtcccatatgatccaccagagactagggatgcatcggcagagtcttttgccactgcttgcccaatcaaagcancagtggaagccaatagagcaacagcaacgcttcttatcaaacaactagcagatggatctcagggagctcagactattgcttctagagagattcggttattgactaaaacgggaaaggaaaaccgtgcttttattgc

SEQ ID NO: 48524 - DNA, 246 bp, Gossypium hirsutum
  Clone ID: LIB3196-053-P1-M1-C5
atgcttgggctctggagtcattcagatgcccggagctgtccctgggtcgctgtgggaccatgggcaagtcttcgtatctctggccctttgttttctctctcaaatgagaaagtacccacctggtgggggtagttgagaagattcaatcattattggctctgtttgtatttgaatgggtgctcagtatgccacttgtggaggtggcagctgcagctaactgggtcggaatttcaggcgtatctaatc

SEQ ID NO: 48525 - DNA, 405 bp, Gossypium hirsutum
  Clone ID: LIB3196-053-P1-M1-C6
gtggtccgatgcctcctgctaaagctggccgtttgacgaatgcatatgtctcatctttcccggcacctcctccatttgtaaggtctccctcccacacccagtaccctactccagtcccaggatacccatccccacctcccatgtatggaagcaggagcccacccaccaacccctatgcttactcaccagaagcagcccctcctccccttgctggttcataccctggagctcccatgaactatcctgcatacgggggctatggtaatggtttggcaccagcatatcagcaggcttactaccgataggcaatgatgacactactctggcgatggtaaccactgatacgctgactaccgacccatctaagtttttatttctaaatggttggtttgtaatcactaaccg

SEQ ID NO: 48526 - DNA, 404 bp, Gossypium hirsutum
  Clone ID: LIB3196-053-P1-M1-C9
atgccaccggctggatggcttcccacctgggcggcctctcttcagaaaatctgaaccaaatctgccttcctgaccgtcagcatgtggtatatggtccctggaacctaccacagtccggctactcccacctcactcgccagggtgagaccctcaatttcctggagattggatattcccgctgctgccactgccgcagccacacaaaccgcctagagtgtgccaaacttgtgtgggaggatacccttgacaaatactgtgaccgggagtatgccgtgaagacccaccaccactcatgttgccgacaccctcccagccctattcgggatgagtgctttgcccgtctggctccgtaccccaactatgaccgggacatcttggccatcgacatcagccgagtcaccccc

SEQ ID NO: 48527 - DNA, 419 bp, Gossypium hirsutum
  Clone ID: LIB3196-053-P1-M1-D1
atcagatgcagacgcatgtctctgacacctccgtggtcctctccatggacaacaaccgcaacctggacctggacagcatcatcgccgaggtcaaggcccagtatgaggagatcgccaaccgcagccggaccgaagctgagtcttggtaccagaccaagtatgaggagctgcagcagacagctggccggcatggcgatgacctccgcaacaccaagcatgagatctctgagatgaaccggatgatccagaggctgagagctgaaattgacaatgtcaagaaacagtgtgccaacctgcagaacgccattgcggatgccgagcagcgtggggagctggcgctcaaggacgccagaaacaagctggccgagctggaggaggccctgcagaaggccaagcaggacatggcccggctgctgcgt

SEQ ID NO: 48528 - DNA, 377 bp, Gossypium hirsutum
  Clone ID: LIB3196-053-P1-M1-D10
cccacgcgtccggcacaaacagtagtaggttttgcattatggtgctgcaagaaggggctgttccaccactagtggcattgtcccagtccggcaccccgagagccaaagagaaggtacataccgcttctgccgggttttctctcttttctacatcacctcctttaactccgaaaatttatatatatatcataaacttctggtccttacaggcacaggcacttctgagctactttcgaagccaacgacatggaaatgctagaagaggctgaaagtcagaaaaacaacctccattggcactatccgatgtttcgtgtctatacggtttgttgcacatttgatgttcgcaaataatgcatgcgaagttttgctgcttgaca

SEQ ID NO: 48529 - DNA, 301 bp, Gossypium hirsutum
  unsure (1)..(301): unsure at all n locations; Clone ID: LIB3196-053-P1-M1-D11
attccggtcgaccacgcgtncgatttttatctaaattatgatatagtaaggtaaacatcatccaaaagctgccttaagactgttgactaacaataagaaccccaaacaaaaaatagttaagacttcatttcatattgaattttcaagtttgtaatgacatattttgagggggggatgtgatgttggtatgtatgagaaaatcatgttactatatttctgatctgttagagaatatttccttttggttcaaggtttatctgtcatctncacaatacagtgaaatggttcaggtgactggcgt

SEQ ID NO: 48530 - DNA, 383 bp, Gossypium hirsutum
  Clone ID: LIB3196-053-P1-M1-D12
gcaagctcgtaagctgttttcatcaatggccgaccgtgaccgctcttaccgatttgaccaggttgttcgtggtgatagaacgaactatcaaagcggaccatcaacaacccaagttctaaccgtcctcaccctccttcccatcggcggcactctccttgcattagccgggctaaccctcaccggcaccgtcatcggcctatgcgtggcaacgccactcttcgtcatcttcagcccggttctgctcccagctgccatcgcggttttcatggctgtggccggtttcttgtcgtccggggcttttgggttgacgggactgtcctcgctctcctacgtatttaaccgcttcagacaggcgactggcaccgagcagctcgacgcggacc

SEQ ID NO: 48531 - DNA, 401 bp, Gossypium hirsutum
  Clone ID: LIB3196-053-P1-M1-D2
agagaaggagatggaacaagtaaacattaaaccaagtcttgatgtccgccttagtgatttgaagcttgttttaggaccagaactgaggatagtttatcctttgattctaaactttgctgttagtggggaactcgagttgaatggccaagctcatcccaaatggattaaacccaagggcattttaacatttgagaatggtgatgtgaatcttgttgcaactcaagtgaggcttaagcgggaacatctaaacctagcaaaatttgaacctgagtatggtttagatccaatgctggacttagctttggttggatcagaatggcaattcaggattcaaagtcgagccagcaattggcaggacaagttgttggtgacctcaacacgttcagtggagcaggatgttc

SEQ ID NO: 48532 - DNA, 369 bp, Gossypium hirsutum
  unsure (1)..(369): unsure at all n locations; Clone ID: LIB3196-053-P1-M1-D3
attgctggtgctggtcctcgaagaaaaaagtacggaaattgagagcgtttaaaccttttgaaagcaatgtaacaataattttatagctttaaatgtaataaattgggatctgcattttgtatgtttcttttattccatatttctctaatgattcgtttttattgtgttttataaaactatcagtctgtgacatggaatgtagaggaaaaacattcttgaaccctagttgcttgtgaaacatgggattctgcaagtgacagtttgtttttgctcttgaagttggagtgttattttgttacatggttaattcatgtcaaaagtatcataggctaagacattatcaaagttttaataacantcctttttctt

SEQ ID NO: 48533 - DNA, 361 bp, Gossypium hirsutum
  unsure (1)..(361): unsure at all n locations; Clone ID: LIB3196-053-P1-M1-D4
cagattctcgactctgtctcccctatcgctctttttcatcgatcagatctcttcaaacccatcaattcaaacaaccctccactcattccatccatgacgcttggctcaggaggatccagtgttgtggtgcctcggaacttcagattgctggaggagcttgagcgtggagaaaaaggtattggagatggtactgtcagctatggaatggatgacggagatgacatttaccttcccctctgggactggcaccattatgggtcctcataatactgtacatgaaggtcgaatctatcagctgaagctgntctgtgataaagattatccagagaagccaccaagcgtccgttttcattcaagaatc

SEQ ID NO: 48534 - DNA, 231 bp, Gossypium hirsutum
  unsure (1)..(231): unsure at all n locations; Clone ID: LIB3196-053-P1-M1-D5
tttcttcaaacctttctttacacacggggggcggtacaggattatggttctccactaanagactgcttcaccactataggtactgtcccataccattacccctagagcctaatagaaggtacataccgtttattattgtctttctttctattttacatcaccttcttgaactgcgaaaatttataatatttatcataaacttttggtcttatcaggcatcatgcatttttt

SEQ ID NO: 48535 - DNA, 425 bp, Gossypium hirsutum
  unsure (1)..(425): unsure at all n locations; Clone ID: LIB3196-053-P1-M1-D8
acttcctttctccncnnnaaattaattnctacgtggggaagatattnaacccttactcgctctccatcctatcacacaattccttataactcccacacactcattaatttccctacccccctcctatcactcttttaactttccccatcactattctaacccccctcatatcccttcctnattctcttctacttcttccaaactctccagtctgtgacatggaatgtaaaggaaaaacattcttgaaccctagttgcttgtgaaacatgggattcttcaagtgacagcttgcttttacncnngaagatggagtgttattctgttacatgcttaattcatgtcaaaagtttcataagctaagacattatcaaaggtttaataacatccttttttccttaacgcgtttgttaaagttgttaagaata

SEQ ID NO: 48536 - DNA, 399 bp, Gossypium hirsutum
  unsure (1)..(399): unsure at all n locations; Clone ID: LIB3196-053-P1-M1-D9
agaaaacaaccgttaaccctgtggaggcaagccaactgctaaacgcttcatctgaaaccctaacttttgcgctcacctgtatgcacacatgcgctcctctattatcatgttccatggctaccataccagctaacccggaacccttcttgaacaatgtgactggaaagactgttatagcgaagctcaaatgggggatggaatacaaaggttttgttgcatctgttgattcatacatgaactggcagcttggcaatgcttcanagtatgtcgatgggcaattcactggagatttaggggagattttgatcagatgcaataacgttctctatcttcgtggggttccggaagatgaagatatagaagatgcatacaaggactagatggttcgcatgtggttga

SEQ ID NO: 48537 - DNA, 381 bp, Gossypium hirsutum
  Clone ID: LIB3196-053-P1-M1-E10
acaagattggcggcattggaactgtgcctgttggtcgtgttgagactggtgttcttaagcctggtatggtagtgacctttggcccctctggcctgaccactgaagttaagtctgttgagatgcaccatgaagccctctctgaggctctccctggtgacaatgttggattcaatgtcaagaacgttgctgttaaggatctcaagcgtggtttcgttgcttcaaactctaaggatgatcctgcaaaggaggctgccagcttcacctctcaggtcatcatcatgaaccaccctgggcagattggaaacggatatgccccaatccttgactgccatacctcccacattgctgtgaaattttccgaattgctgaccaagatcgaca

SEQ ID NO: 48538 - DNA, 419 bp, Gossypium hirsutum
  Clone ID: LIB3196-053-P1-M1-E11
atcccgccacgcgaggcagcggcgcacggatcaagggattgaagaatgtcccggattccactggggaaagttctcctgaggaatgtcatccggcacacagatgctcacaataagattcaggaggaatcagatatgtggaaaataagagaactggaaaaacagatggaagatgcttaccgggggaccaaaaggaaaatgctacccagcagttcaagccggatgcgcagtgatggttttgatgaagaaagtcaaagagactattggaggccaaagaatgaaatttctgggacactggaagatgattttcttaaggcaaaatcctggaacaagaagttatatgattatgaagctaacatgccagacagatggggtcacagtggttataaagagttataccctgaagaatttgaaacagacag

SEQ ID NO: 48539 - DNA, 396 bp, Gossypium hirsutum
  Clone ID: LIB3196-053-P1-M1-E12
cattggtatacttcaaaagctcatctgtcaccccagagccccttctctccgccgaatctcctttttcccccgtaaaaaatgtctctggtggccaacgaagattttcagcacattttgcgtgtcctgaacaccaacgttgatggaaagcagaagattatgtttgctttgacctccatcaagggtatcggaaggcgttttgccaacattgtttgcaagaaagccgatgtagacatgaacaagagggctggtgaactgactgcacaggaattggacaatctcatgacgattgtggcgaacccgaggcagtttaaaatcccagattggtttttgaacaggcagaaggattacaaggatggaaagtattcccaagttgtgtccaatgctctcgacatgaag

SEQ ID NO: 48540 - DNA, 385 bp, Gossypium hirsutum
  Clone ID: LIB3196-053-P1-M1-E2
atgcttttttgaaagcattttacaaggttatatcccatcaggttgcttaggaacttttgcagcctccttcaacattatcattttcatttgaattgacactggcagcttgacacctctggacacctggcatggcaggtggggccacctccaaataccgtctttccgtgtctgcaccttcaacaagattttctctgtaaattctgctccaaaacaatttctataaacacagcattacttttgtcttgttcacaaatcagatttggaaagaggtgcttggggactgtcataagtctatttaaagatagcttgatttaaataaaaacaaaaacaaaactttttatccaagacaattttctttcattatgggaaattagtttcaatggct

SEQ ID NO: 48541 - DNA, 127 bp, Gossypium hirsutum
  Clone ID: LIB3196-053-P1-M1-E3
atggcggatttcattggcgcgccgcggagaggccaggcgagtggtgcggagtaggcgccgtcgctgagccgaagaggaggatgcggaagacgcctttgcagtcggtgcgtgtgaccttagtgcggcg

SEQ ID NO: 48542 - DNA, 247 bp, Gossypium hirsutum
  Clone ID: LIB3196-053-P1-M1-E4
atgagcacccaagaagaaaatggccataagtggagtccccgtgctaggatttttcatcatagctgtgctgatgagcgctcaggaatcatgggctatcaaagaagaacacgtgatcatccaggctgagttctatctgaaccctgaccaatcaggagagtttatgtttgactttgatggtgatgagattatccacgtggatatggctaaaaaggagactgtctgtcagtttgtatattttgtactattt

SEQ ID NO: 48543 - DNA, 123 bp, Gossypium hirsutum
  Clone ID: LIB3196-053-P1-M1-E5
atcaacaacattccagctgatatcgtctttgttttaaaggacaggccacacaatatctttaagagagatggctctgatgtgatttatcctgccaggatcagcctccgggaggctctggtggct

SEQ ID NO: 48544 - DNA, 238 bp, Gossypium hirsutum
  Clone ID: LIB3196-053-P1-M1-E6
atggtctgcagaacgtagcgcacgccaccatggatcgcgatcgcgagcacggtctccgtgtggagctcaaccgcattcaggtcaaacgatcaatgaccaaacgtgcgctgtctgtccccgacgactccaagtctgtatgcatgcacatgtgtatttacatgacctccgttgctcccatcagcctgctcattcttcaccttctcttgcaagacacgtttgtgcatatctctgccgacta

SEQ ID NO: 48545 - DNA, 399 bp, Gossypium hirsutum
  Clone ID: LIB3196-053-P1-M1-E9
gcgagaatcctactttgttccttgtccttgtcgtgacgtgacaacctatttccatcaaaatttagcttgcttaaggtaaaaaaatacctaaaaatttatgtatacacttctaggcaaccaacttacaacttatcaataagttaaagtgataaaataccaaaattattaactatcgaaaccaacttcaatcctatatactccaaactaaccaaacaccatttcaagtcattagcaaaagatcatattttatacaacataaacctttgacacatttagccaaaagtccctaggtacatgccaaaaaaccaaaatgaaccactttatacaaactttgttgggttggaaacaataatctagatgctgacttcaattcctaaggcttcaagaagaatctaaact

SEQ ID NO: 48546 - DNA, 393 bp, Gossypium hirsutum
  unsure (1)..(393): unsure at all n locations; Clone ID: LIB3196-053-P1-M1-F1
gaaaaaagtatcggattggtagatcttgtatacgaacgtttatcaagacacaccttacctcaaaagagcattctgttataagccctcttgagcttcccgttttatggttcctgcgagcatcttgatcggtagtgatcctgcatgtgttgcggactaccgcaactctttgtgagcgtcccgttgtacgactgattgtggtcctgcatatattgaggacacaaatgtggctctttatgagtgtcctgatatgggctcttttttatcttcctaatatgtctcgcttgaacttcctattatatggctatccgaagctccttgataataactcttcggagttacctgttaagctcattgagcttcctattttaaactcatatgaatntcctgttatag

SEQ ID NO: 48547 - DNA, 376 bp, Gossypium hirsutum
  Clone ID: LIB3196-053-P1-M1-F10
gagataataaagaagaatttgagagagggaagggaagaggaggtgtcccaaatgacaaattaattttcaaattccaattcaccacataaaaggaaaagaaaattattgggggaaagcacaaaactgaaaacagataagagaagggaagggaattatggaaggcagagaagagattaagggatcaaaacccagttttcctttaagcttttgggaggtgacgatggcttttacggtggtgatgggttttgttttggggcttgggggagtttatttaaccatgcccgcttctgattatagcttccttaaattacccagaagccttgaagatcttcatatcctcagagatcaccttgaaatctacacaagtgactacacc

SEQ ID NO: 48548 - DNA, 357 bp, Gossypium hirsutum
  Clone ID: LIB3196-053-P1-M1-F11
attgcgtgccggggccagggccgaacggctcgccagtgcaaagcaggccccttggggagacggcaggcagcaaaaggcttccttggcaggggttctgggcgtttggggaggggaggtgctcagagatagggccgaggatggagctcccaggtgggttggagccgtgggtggctgggctcgagggcgctgttgcagtccggggtctggaagaggcgatccccgggaaagccagcttcagagccgggagaggtcggcaagggacctactgcaggagcccccaggtgggggtagggagggggcccagacctgtgccaggagggatgctgaatccccatcgcctagctccggggccttgca

SEQ ID NO: 48549 - DNA, 379 bp, Gossypium hirsutum
  Clone ID: LIB3196-053-P1-M1-F12
cccacgcgtccggcaggaatcaatacagtctgcatgtttgaagatgcacctccagacatgtcccttttcagagctataatggacacaaatttctggggttcggtttatacaacccgatttgcagttccacaccttaaaaacagcaaaggcaagatcgttgtcatgtcttcagcagcttcatggatgaatgatccaagaacaagcgtctacaatgcaagcaaagcagcattgacagcctttttcgatacattaaggattgaacttggatccgaggttaagataacaattgtaacacctggttttatcgagtctgaaatcacccaaggcaaattccttcaaagagatggtaacatggaagttcagcaagacatgagagatg

SEQ ID NO: 48550 - DNA, 396 bp, Gossypium hirsutum
  Clone ID: LIB3196-053-P1-M1-F2
ttcaaaacaagaaattctcgtgtttcaatcggatcacgattaaatattaaattgaactcgtatttttaaaaattaagataacacgtgtttaacaagataccaattttgggcgtcgcgagggtgctaataccttcctcgcgcgtaaccgactcccgaactcgaattttctctggattcttacgtagacctaaaattacctcttttttagaaaatttaaaaataaaattttcttctaaaaagagaatttattaggtgtccgatcacacctagaaaaaaaaaagatcggtgacgactcctttttcaaataaaatcgagattcagttttcaaattttcaatacttacttcgactagcgcccgtgcccaatttttaggtcgctacagctggcgactccact

SEQ ID NO: 48551 - DNA, 233 bp, Gossypium hirsutum
  Clone ID: LIB3196-053-P1-M1-F4
tcgcccacgcgtccgcccacgcgtccgggcacgcgtccgctgccacagatctcccatttttcttctccctaagacgcttcgccccataacccatctaacaatggtggcctcaaaattctgttttgctttttctcttgctattctttcaatcttggccgatgatgctgtccaacaccatgctctggcgccctctccttcttcccccgtggactgctcctctctgattctaacat

SEQ ID NO: 48552 - DNA, 400 bp, Gossypium hirsutum
  Clone ID: LIB3196-053-P1-M1-F5
atcgcctggtcctcttccggtcaccagcccacaggcagcagctgggctgaggggatgacagacctgggtcctcagcctccctgggcttggtttctccatctgcatctgagagtgatgggcaggcgggcatcccgggcggggacaggagaagagagagatgcagatgcagtctgcttcctggatgccagaccaagtggtctagttttcaaggcttgtgtttttgggggactcttgatcagatgggaccactccccacaggccgttccttgtggctgcagtggcactaagctctcagactgcctggctgcccctgtgacctcaggagcccactcccatcgggccctgccttctctccttcctatgcctctggtgctggtcctgtgtcttgcccctcttctga

SEQ ID NO: 48553 - DNA, 401 bp, Gossypium hirsutum
  Clone ID: LIB3196-053-P1-M1-F6
tcttgacaagatcgaaaatgacttttcttggaatgcatcaaagcctaccctaaattcgtgagctttcgtgagttgaagggtttaatgcaaatggagattttttggagagaagaaatggatataaatggagaatattaaagacttacatttcaattatgtgttaatttcaagacttatgtaatgtttttaattatgtagtgattcaattcgggtaattcggttaattcggttaatttttaactaaaaataaaaaccatataattttctattaattcggttaaccgatcgatttaaccgaaaaaatttcggttcgattaatttttttttttaaaattcagttcggttaacggttaaaaattttggaaggtcggttaatccagttatagttattttgggtcggt

SEQ ID NO: 48554 - DNA, 357 bp, Gossypium hirsutum
  Clone ID: LIB3196-053-P1-M1-F7
atggcagatatacgaaccgattcacagctggtgctggaggcggttataagctttatgagagatacatgccggccgtgtattcagtcctgtctgcctagctagaggtgcctatcagctcgtggctcgaatatgttactttaaaccataatatctatctttactgtcatgtgcagctggatcgaatcatagataccaatactgctgaaactgatggaaagcactccggagtaccacaaactgctgcacaagctgcatagtggatcctacacgaccatcgtgggcctctcacgatgcttaacaacacgctctactattcaaaccacacaccacagtgtgcttactaaagcatcacaggat

SEQ ID NO: 48555 - DNA, 285 bp, Gossypium hirsutum
  Clone ID: LIB3196-053-P1-M1-F8
gcaaagtgggtaaatagttgttagcaattctccacataaaaatacgaattttgcatggcacatggagctcacataattttgtaaaaaaattagtaggaagttcattatgtattctagtaccccctctgtaattagccatctgtattcgctcttagctgtatatgtcccagtattatcccctcgccataccaatgcatcttgtggtctactatttgccaatggaattgtgagaatgcgcttcaactaaaaaaaaaaaaaaaaaaaataaaaataaaataaaaaata

SEQ ID NO: 48556 - DNA, 395 bp, Gossypium hirsutum
  Clone ID: LIB3196-053-P1-M1-F9
cccacgcgtacgaattatgtattgattttgagtatgatcctgctaatttgagctatttatgatcttctatctcataggaactaaatttgaggcaaaagtaaaattaagggccaaaagcgtgaatttagatataaaatgggccaatgtgcgacataaggaaaagttggtgccaaaagtgcaatcatggaggacacaagggttgaaatacaaaaagaagagatttattctattaaactctattttaattatattaggataattaatattgagataattattaaggattatttttaggattttattttatttatctttatttatcttcaattaaatgtatttatcttttaggaatttaagtaggattagactatctcccctatcactataaatagggg

SEQ ID NO: 48557 - DNA, 409 bp, Gossypium hirsutum
  Clone ID: LIB3196-053-P1-M1-G1
aacaagtgtgacgcaaaagcagcgctgctggctaccgcgcgcgagtatctcggcgatatcgctcggtcatgttgcatcacgcacgtgaactctctggtgttacgggtacagggcaacacgatgagcaccctgggacactactcgactattaaccagtggctggcaggcacggcggttggagcaatctagggcgtaatgtggtggccgacggagcttgccaagaggcgactgaagattgaggacaggagcccgtgacgcacctacaagggttagatggactgccttgagcagatatacgcgcaccagggtatgcgtggcgtcaacactggcatgttgactcacactgatgccagagacgcccatcttctgcgtctaatcaataacctacgacgcgctcacactagcgctt

SEQ ID NO: 48558 - DNA, 397 bp, Gossypium hirsutum
  Clone ID: LIB3196-053-P1-M1-G10
cccacgcgtccgcactgattttggctagggctaaatgccctattgtttaggctgaacaatcgatttagtttttgtgcaattttactaataggtttgttttggatgtcgttcataaggtctaaaagtgtgttgtagtgtcaatgttctgaaaatcaccaggtttgtgacttgaactcgattaaactatgaaactgtacgaaatagaatctgccagtcaacgctacaagactgtttgtttggtcgtgcattatgccgtgtgggctacacgagttggacttttaaggcatgtaggccacatgggcgtgagggcccattttatacgttaagttatccgaatgtgtgtttcgtaaaactcttaacgactaagtggaatttatgaaatctgttaaaatcatta

SEQ ID NO: 48559 - DNA, 377 bp, Gossypium hirsutum
  Clone ID: LIB3196-053-P1-M1-G11
gcagaacccagagaggggaacgggaggaggaagagtcgcaagagagcggcggaaacaatgtgctcagtggctttcgcgacaatctcctggcgcaggctttcggaattgataccaggctagcaaggaagctacaaaacgaaagagataacaggggagccattgttagaatggagcatggatttgagtggcccgaggaagggcagaggcgacaaggacgtgaagaggagggagaagaagaaagagaaccgaaatggcagaggcgacaagaaagtcaagaagagggatctgaggaagaagaaagagaagaacgaggaagaggaaggagaaggtcaggaaacggcttagaagaaacattctgctcaatgagactgaaacac

SEQ ID NO: 48560 - DNA, 403 bp, Gossypium hirsutum
  Clone ID: LIB3196-053-P1-M1-G12
aaaatacagagcttatcgtaatcatggtgaggaataagtcagcttgcgtagttttgctcttttctcttttcctttcctttggcttgctttgttctgccaaagactttcccggaagaagaggcgacgatgatcctccgaagaggtacgaggactgccggaggcgatgcgaatgggatacacgtggacaaaaggagcaacagcagtgtgaagaaagttgtaaaagtcagtatggggagaaagatcaacagcagcgccaccgccctgaagatccccagaggagatacgaggagtgtcagcaagaatgccgacaacaagaagaaaggcaacgaccacaatgccaacaaaggtgcttgaaacgattcgagcaagaacaacaacaatcccagaggcaattccaggagtg

SEQ ID NO: 48561 - DNA, 420 bp, Gossypium hirsutum
  Clone ID: LIB3196-053-P1-M1-G3
atctgagatctgagatcgaccacgtcaagaagcagtgtgccagcctgcaggccgccattgctgatgctgagcagcgtggggaaatggcactcaaggatgccaagaacaagctggaagggctggaggatgccctgcagaaggccaagcaggacctggcccggctgctgaaggagtaccaggagttgatgaacgtgaagctggccctggacgtggagattgccacctaccgcaagctgctggagggcgaggagtgcaggctgaatggcgaaggcgttggacaagtcaacatctctgtggtacaatccaccgtctccagtggctatggcggtgccagtggtgtcggcagtggcttaggcctgggtggaggaagcagctactcctatggcagtggtcttggcgttggaggtggcttcagttcca

SEQ ID NO: 48562 - DNA, 418 bp, Gossypium hirsutum
  Clone ID: LIB3196-053-P1-M1-G4
atgtcgcatgctaaggatggtacttgcatatggtgaattactgttgacagtttccgcagaaatcctatttcagtggaccaacattgtggcatggcagcaaatgccaacattttgtggaatagcagcaaatctacaagagaccctggttggtttttcgttttattttctttgtttttttcccccctctcctgaatcagcagggatggaaggagggtagggaagttacgaattactccttccagtagtagctctgaagtgtcacatttaatatcagtttttttgaaacatgattctagttaaatgtagaagagagaaaaaagaggaagtgttcacttttttaatacactgatttagaaatttgatgtcttatatcagtagttctgaggtattgatagctttctttatttctgcctttacg

SEQ ID NO: 48563 - DNA, 325 bp, Gossypium hirsutum
  Clone ID: LIB3196-053-P1-M1-G5
ctttgatcgatacttgaataatatgtcaggaagaggaaagggaggcaaggggttgggcaagggcggagcaaagcgccaccgcaaggtcctccgtgataacatccagggaatcacgaaaccggcgatccggcgtctagctcgtaggggaggtgttaagcgtatcagtggcttgatctacgaggaaacccgtggagtgttgaagatcttcttggagaacgtgatccgcgacgccgtgacctacactgagcacgccaggagaaagacggtgaccgccatggatgtcgtttatgccctcaagaggcagggtaggactttgtacggtttc

SEQ ID NO: 48564 - DNA, 401 bp, Gossypium hirsutum
  unsure (1)..(401): unsure at all n locations; Clone ID: LIB3196-053-P1-M1-G6
ctgtgctccaagatttgtttttgctgtgctgctctatttcttccttctctactagagtgttggaatttagcaaaaacatgagttatctgggtgtgggagttagccctgggaatgttcccgtctaccatggcactaatttgaaggtcattgatagaagagtgagagttgcagagctggttttgaggtgtctcatatgtggcttaagcgttcttgcagctgttcttgttggaacagatacccagatcaaagagatcttcactattcaaaagaaagctagatttacagacatgaaagctcttgtgtttttggtggcggccaacggcataactgcagcttactcattggtacaaggactgcgttgcgttgtgggtatggtgagaggaagtgtncctttagtaagc

SEQ ID NO: 48565 - DNA, 398 bp, Gossypium hirsutum
  unsure (1)..(398): unsure at all n locations; Clone ID: LIB3196-053-P1-M1-G8
caaagatgttttcccatctttttgttgatggtctaattatcatattaggacctataatttcaagtttcatgactatttggcccttttagcatctagcactcaactttcacattttattcaattcggtcatttctctaatttatcattaaattggtcaaattttcctatcgatatttttcatatgagttttctatcatattacatatcatgcaataacattaaaatatatttcaattctagcttaaatttatggntatgaaaccactattctgatatcaccaaatttaggccgttacaattctcctccttaaggattttcgtctttaaaaaatcttaccagtaaagaggttcggctcccatgtagcctcttcaatcccatgttgttgccaaaggacttt

SEQ ID NO: 48566 - DNA, 384 bp, Gossypium hirsutum
  Clone ID: LIB3196-053-P1-M1-G9
gagagaagagtcccgaagccccaactatcaaaagatacaatctcatccctcccacacccattctcccgctatatctgcaacaatggccattttgtgcccttcataaaataatttcccctctgcaagacatttactcattaatctctagaaagggtctttgtgattatcgaaaatggccacaatcgctgcatgttcttctcacttgttatctgcttctacccatttccatggcttccctaaaacctatctaaaaatttattccccttttcttcataagctcaaggactcaactcagtatcttgaagcacacaaatgtggtttgagcatgaaaacaaaaccaagtcattctgaatactaagccaagtatctgttctgctataaata

SEQ ID NO: 48567 - DNA, 395 bp, Gossypium hirsutum
  Clone ID: LIB3196-053-P1-M1-H1
aaggagagaaagagacgacagacacaggcaaacacacacacatagacatatacagcaagaaaagaaaagaaaagaaaggaaaagaaaagaaaaggagggaattgaagaaagctttcataccttagaagagaaaacgatgtcttaagagctctctctcttacatatcctttcattctctgcaactctctaacaagagaaggtatagatgatgatgatgaaggcttgttgatatatgattctaaagaaattctatggcttcccaaggttaccaccatcaccaccaccaccaccatcaagcagctgctggtatcttcagtttctcaaatgggttcgagagatcagccataaaccaccaagaacagcagcagcagctggtacaacagatccggagagat

SEQ ID NO: 48568 - DNA, 419 bp, Gossypium hirsutum
  Clone ID: LIB3196-053-P1-M1-H10
atgcgggcagtccaatcttaaagctccaaaatgacctcctttgactccaagtctcccatcagggtcacgctgatgcaagaggtgggcttccatggtcttgggcagctctgcctctgtggctttgcagggtacagcctccctcctggctgtaacatttatttacagccaactgttctttgacaaagtcaacaaaaacacacagtgatgaatgggcactctattcaataaatggtgttgggaaattggatggccgtatgcagaagaataaaactggaacaatgtctcttgccttatgcaaaaattaactcaaaatggattgatgacttaaatgaaagacctgaaactgtaataattctagaggaaaatatgggacaaactctcctacgtattgacctaggcaaaagatttatgactgaatc

SEQ ID NO: 48569 - DNA, 390 bp, Gossypium hirsutum
  Clone ID: LIB3196-053-P1-M1-H11
gttccagtaaggataacagagtttgaaataatgtctgggtttttctttacattgctgctttgtttcatcatttttaattgttactcagagggtagccatggatatcagcaacagcaatctgctgttgttgttggaactgtgtactgtgatacatgtttccagtctgacctctcaaggccaacccatttcatttcaggtgcaactgttgaagtggaatgcaaagatcggaagagctcaagggcaagctttaggcaacaagtgaaaaccaataggcatggggaattcaaggttcatttgcctttttcagtgagcaaacatgtgaagaaaatcgagggatgtgaagttaaactgattaaaagcagtgagccatattgtgcagtggcctcatct

SEQ ID NO: 48570 - DNA, 326 bp, Gossypium hirsutum
  unsure (1)..(326): unsure at all n locations; Clone ID: LIB3196-053-P1-M1-H2
cccacgcgnccgctcgaactctcgggccaaatcntgttttgcgaaaagacgccaaacagataaattttgtgattcctcttttctttctcagatcccttcgaaagcgattcttgttatcaagcttattagatttcttttaaatcgaattgaagttgctgattctaaatgagttcggccgaccttctcagcatcgaccctttagagctgtagtttccttttgagctgatgaagcagatctagtgttcttttaaattttcgaataaatctgataattatgtttcttttcaaggtgataaacgacaaatccaaagaagttctgctttcgt

SEQ ID NO: 48571 - DNA, 399 bp, Gossypium hirsutum
  Clone ID: LIB3196-053-P1-M1-H3
cggacgcgtgggttttggtgctcctcgtccttttgcaccgtatggacccaggttttctggagattttacgggtcctgcatctggcatgatgtttccagggcgacctccacagcctgggggaatgtttccatctggtggaatcgggatgatgatgggtccagggcgtgcaccatttatggggggtatggggcccacaggtgctaatcctgctcgaggtggccggcctgttggcatgcctccgatgtttcccctacctccagcacctgcctctcagaactctggccgggctattaaaagagatcagaggacaccaaccaatgacagatctagtgcaggatcagagcagggtagaggtcaggaaatgggtgggccagggggtgggttggaagatgagacaca

SEQ ID NO: 48572 - DNA, 421 bp, Gossypium hirsutum
  Clone ID: LIB3196-053-P1-M1-H4
atggtgcgtgctctggaggaggccaacgccgacctggaggtgaagatccgcgactggtaccagaggcagcggcccagtgagatcaaagactacagtccctacttcaagaccatcgaggacctgaggaacaagatcattgcagccaccattgagaatgcgcagcccattttgcagattgacaatgccaggctggcagccgatgacttcaggacaaagtacgagcacgaactggccctgcggcagaccgtggaggccgatgtcaatggcctgcgccgggtgttggatgagctgaccctggccaggactgacctggagatgcagatcgaaggcctgaaggaggagctggcctacctgaggaagaaccatgaggaggagatgcttgctcttcgaggtcagagcgggggagatgtgaacgtggaga

SEQ ID NO: 48573 - DNA, 422 bp, Gossypium hirsutum
  Clone ID: LIB3196-053-P1-M1-H5
atgtgaattctaccaaaggagactacaaacttgcagcttaaaatgggaaccagttcccacactggcttaatttatataactgcttggctgtattgcgggtaatattagtagcacgatgcacttcatttttaaacgagatgttactattatattgcttaaatgcactagcacttggactttgtgagatgcacatgtgtcactcagagtgctggcttatttaaaggtcaagccaaggagtttgtggatcagccacaactactgttttctaagacgattgatgtgaaggacttagtgaagtaatttttatattttggacttcccagcatgatgtcctttttaatgactgccatgctttttttggactcagtaaatatttggaattgttagaaaagtctcattactttgataaaatgcatgacatg

SEQ ID NO: 48574 - DNA, 361 bp, Gossypium hirsutum
  unsure (1)..(361): unsure at all n locations; Clone ID: LIB3196-053-P1-M1-H6
ctgtactgcatgatgaaaccaaaagtaattctgatcaaaagaatcaggtaaaattgcaaaatgcaatgcagctcaaaccattgcctccacctcccccccctgcacaatggcgggtttcaaaaccctgcttcaacgaggcagaagaaagacaacatgctttatcagagtcactgagacatgagcttgatctgaaacttcttagttctttcgtctctcagaagcctgagccagctntagttaatcaacagaaaataaaggntnaggcaaatgcattgaaaccagagaagaaggtggacgaagagataaataatggacagaaaggcgtaagcctgctcagtggtggccgagggatggatgaaaa

SEQ ID NO: 48575 - DNA, 419 bp, Gossypium hirsutum
  Clone ID: LIB3196-053-P1-M1-H7
atgcagtgctggaggtgcaggtggcatgtggaggggccagaccaagcatcccaggcaagcatccttctgccgggtattaataggaagccccacgccgggcagctcagccaacgaagcagcagccggctgagctgaacccagcaggtcgtctgctcccgcctgtcctctcgtcagccttcctcttccagaagctgttggagagacattcaggagagagcaagccccttgtcatgtttctgtctctgttcatatcctaaagatagacttctcctgcaccgccagggaagggtagcgcgtgcggctctcaccgcacgatggggcctagaatcaggctcgccttggaggcctgacagtgatctgacgtccactaagcaaagttatttaaattcatgggaaaatcacttctgccctaaacgaag

SEQ ID NO: 48576 - DNA, 396 bp, Gossypium hirsutum
  Clone ID: LIB3196-053-P1-M1-H8
cggacgcgtgggcggacgcgtggggcgcggagaagctaagctgagaaaagatgcaggcgattacgaggcgattagggcaccaatctctgaggccaactgcttcaatctcttctatcaagtctatttgcgctctctccgatcactactatggaggtgatcatccgcgatacggatctacactggcttcccacaagggcatgggccacctcgttcgcaagggcaccggtggccgatcttccgtcagtggcattattgctactgttttcggcgctactggattccttggtcgttatcttgtgccacaactggctaaaatgggatctcaggtgttagttcccttcagaggttccgaggataaccctcgtcatctcaagttgatgggagatttaggacaga

SEQ ID NO: 48577 - DNA, 398 bp, Gossypium hirsutum
  Clone ID: LIB3196-053-P1-M1-H9
cccacgcgtccgtgcagctcgcttctctagaaaggccgcggcctcggcgttctccggctgccgctacgtcaccgcttccagtagtttctccgcggaggctgccaaaacgatctcgccatcgtcggatcgagtgaagtgggactacaggggtcaaagaaaaatagtccctctcggtcagtgggtccctaaggtagctgtcgacgcttacgttgcccccaacgttgtcttggccggtcaagtaacagttaacgacggagcctcggtgtggaatggttgcgtcctacgtggcgatctcaacaagatcaccgttgggttctgctctaatgtccaggaacgctgcgtcattcacgccgcttggtcctctccgaccggacttccagctgagacatcaattgaga

SEQ ID NO: 48578 - DNA, 390 bp, Gossypium hirsutum
  Clone ID: LIB3196-054-P1-M1-A1
atggccgcgatggcgctggtggccggcgggctctgtagagggctgggctcccacccggccgccccaggccgggacgcggtagtcttcgtgtggctcctgcttagcacctggttcacagcccctgccagggccatccaggtgaccgtgtccgacccctaccacgtggtgatcctcttacagcccgtgaccctaccctgtacctaccagatgaccttgacccccacgtaccccattgatatctggaagtacaagtctttctgacatgaccgcatcgatgatgccttattcccagccagcgtcgacaaccagctcaatgcccagctggtagccgggaacccaggctacaacccctacgtcgagtgccaagacagcgtgcgcaccgtcagggtc

SEQ ID NO: 48579 - DNA, 370 bp, Gossypium hirsutum
  Clone ID: LIB3196-054-P1-M1-A11
cccacgcgtccggcgttaaactgctttctttaaagcctgcaaaatgggtgccggtggtaggatgctagttgacggtaaaaaggaggaaaaacgaggctcggtcaatcgagttccgatcgagaagcctccgtttacgctcggtcagatcaagcaagccattgcgccccactgttttcgccgctccctccttcgatccttctcctacgtggtccatgacctatgcttagcctctctcttttactacattgcaacatcatattttcactttctaccacaacccttttactacattgcttggcctgtctattgggttctccaaggttggatcctcaccggtgtttgggtcatcgcacacgagtgcggtcaccac

SEQ ID NO: 48580 - DNA, 368 bp, Gossypium hirsutum
  Clone ID: LIB3196-054-P1-M1-A12
cccacgcgtccgcggacgcgtggggctgggtgacgcatctgcttcatttgagaagaactgcgtgaggggaattcaagccaatagggaaagaatttctaaattactgcatgaggtcaatgccacatcctgaatattttaagtttattttgataccatatgatagattgtcaagctaatgatcatatgttgtcttgtgacattttgactggtcttgcagtctctaatgcttgtcacatctttgaaccctgtaagttctcttccctgcttctatctaggatcagttgttcctcaatgagtcttttgcattttgaacacgtctctaatgatctctttgcttccagaaaattggttacgacaatgctgcagca

SEQ ID NO: 48581 - DNA, 387 bp, Gossypium hirsutum
  Clone ID: LIB3196-054-P1-M1-A2
cggacgcgtgggctacttgtaaaaactggtttctatacatgaggtgcatgtggcatgtcatgtgtcactattgaatgttgtgttatggcatggaactagcatcatattttccattttcagtcatttagttcctaatgaaaatgggctggtttgcacgtagtccttgaattgctggttggttccttatccggttattttcccattccttttgctccgaatagtcacttgtgtttggctcgactcttcattttgcttgaagtatttgtggccatactcatataaaacacatattcatgcccaaagtttacacctgactttgagtaacattgttgcttccttcgaagtaaacatataatctttccccttatccatgtagcaaccaggatg

SEQ ID NO: 48582 - DNA, 75 bp, Gossypium hirsutum
  unsure (1)..(75): unsure at all n locations; Clone ID: LIB3196-054-P1-M1-A3
naaaaaaaaaaaaaaaaaaagaaaaggggaaaaaaaaaaaaaaaaaaaaaaaaaaaaaaaaaaaaaaaagggagg

SEQ ID NO: 48583 - DNA, 370 bp, Gossypium hirsutum
  Clone ID: LIB3196-054-P1-M1-A4
ctctttctcccatggctgcctccgttgatcctctcgttgttggtcgtgtcattggcgatgttgtcgacatgttcgttcccaccgtcaccatgtccgtctactatggttccaagcacgtctctaacggatgtgacattaagccttctatggctatcaaccctcccaaagttgccatcgatggccttcctgaccagttttatactttggtgatgactgaccctgatgcgccaagtcccagcgagccaaccatgcgtgaatgggttcactggatcgtgtctgacattcctggaggaaccaaccccactcgagggaaggaaatcctggcatacatgggtccacggcctccagtaggcatacatcgctacatact

SEQ ID NO: 48584 - DNA, 359 bp, Gossypium hirsutum
  Clone ID: LIB3196-054-P1-M1-A5
atgcaagcttctgtctgcacctgctctcaatcctgctctcactatgagcctccgcctgcagagctcctccgccagctatggaggtggttttgggggtggctcttgccagctgggaggaggccgcggtgtctctagctgttcaactcggtttgtctctgggggatcagctggaggctacggaggcggcgtgacctgtggctttggtggaggggctggtagtggctttggaggtggctacggaggtggccttggaggtggctttggtgggggttatgctggtggctttgttgattttggtgcttgtgatggtggcctcctcactggcaatgagaagatcaccatgcagaaccttaacgacc

SEQ ID NO: 48585 - DNA, 372 bp, Gossypium hirsutum
  Clone ID: LIB3196-054-P1-M1-A6
tatcattgagtatgtgaaggaagcagggcgcgtaggcaagggaaatttaccattggagggcacacccgagattgcaaagacagaagcatgggacggtaaagatggagaaatcatggaagaggatgagatctcacttgaagaactcatgggagattttacagcaagtaaagatgagttgtaataaaattggaattagtttagggtaaaaagaagggttttgatgttcgggcgtgtccgttattttggtttttactgattgaaacaattatcccaagtgaaacagattattagagatgatccaaatatttaaggagtgttatttcatctaccaacaatggttaataacctgggttggtagatatactattaaaa

SEQ ID NO: 48586 - DNA, 346 bp, Gossypium hirsutum
  Clone ID: LIB3196-054-P1-M1-A7
cttgagtaaagagtagacctttttgggggggttctagaatttgaaagcgagaactcctttactttatctttatttggtgtaactacttgagccggatgagaggaaactctcatgtccgattttgagggggggatcccgcagggccctatcctaatttttcttttgctaggcccatcgctaaaaaacctactttcttacgattacgaggttgattcgaatatgaaattcaatcctggaaatacagtatcccacttttttttactacccaaggtttcgatacatttcgaagtcgcgaaatttctaccggagcaagtgctattcgagaacaattagccgatctaaaatt

SEQ ID NO: 48587 - DNA, 383 bp, Gossypium hirsutum
  Clone ID: LIB3196-054-P1-M1-A8
atcacagcttccgcccagcgtaccgcaaggtgttcctgcacgaagcaactgtgcgcctgatggcaggagccagccccacccgcacccaccagctgctggaacacagcctgcggcggcgcaccacacagagcgccaagcacggagaggtggatgcctggcctggccagcgagagcgggccaccgccatcctgctggcctgccgccacctgcccctctccttcctctcctccccgggccagcgggcagtgctactggccgaggctgcccgcaccctggagaaggtgggtgaccggcgctcctgcaacgactgccagcagatgattgtcaagctgggtggtggcactgctattgccgcctcctgaccaccaggctcagcccacccc

SEQ ID NO: 48588 - DNA, 288 bp, Gossypium hirsutum
  Clone ID: LIB3196-054-P1-M1-A9
cccacgcgtccgttattaatcaatctgttcgaaaaaattacaagtgtacttagacgaaaatactacagttagggcaccagatctaacacaagatgagtccaaccagtgtcattctgaggacacaaagagggcgttacgagattgggtgagggagaatgtcacaggccacggatcaaagtccatgaccattgtacacaaaatgtcccatagaggtcaacttattaaatgatgctcatttgacccatatgaactatcccgatttgtgaaacccatggagaagctcatcta

SEQ ID NO: 48589 - DNA, 383 bp, Gossypium hirsutum
  unsure (1)..(383): unsure at all n locations; Clone ID: LIB3196-054-P1-M1-B1
ataaaatgtctactgttcatgaaatcctgtgcaagctcagcttggagggtgatcactctacacccccaagtgcatatgggtcagtcaaagcctacaccaactttgatgctgagcgcgatgctttgaacattgaaacagccatcaagaccaaaggtgtggatgaggtcaccattgtcaacattttgaccaaccgcagcaatgcacagagacaggatattgccttcgcctaccagagaaggaccaaaaaggaacttgcatcagcactgaagtcagccttatctggccacctggagacggtgattttgggcctattgaagacacctgctcagtatgacgcttctgagctaaaagcttncatgaaggggctgggaaccgacgaggac

SEQ ID NO: 48590 - DNA, 392 bp, Gossypium hirsutum
  Clone ID: LIB3196-054-P1-M1-B10
atgcgagctgtgccgctcgcggtaccgctgggtcagacagaggtgttccaggccttgcagcggctccatatgaccatcttctcccagagcgtctcaccgtgtgggaagtttctggcggctggcaacaattatgggcagattgccatcttcagcttgtccgctgctttgagctccgaagccaaagaggaaagtaagaagccggtggtgactttccaagcccatgatgggcctgtctatagcatggtctccaccgatcgacatctgcttagtgctggggatggggaggtgaaagcctggctttgggcggagatgctcaagaaggggtgtaaggagctgtggcatcggcagcctccatacaagaccagcctgggagtgcccgagatcaatgctct

SEQ ID NO: 48591 - DNA, 440 bp, Gossypium hirsutum
  Clone ID: LIB3196-054-P1-M1-B11
acactatagaacaagtttgtacaaaaaagcaggctggacccggcccggatttccggggttggaatttgcagagcctatgaatgggatgacttaaaggtttggagccgtgaaccttaattcttcattgaacatgcttcctgtccgaccccaaactaacactttgatagggggacccatgcctatgagcatgcccaatgtggtgactggccccatgggaatggcccctcttggaaatactccaatgatgaaccagagcatgatgggcatgaacatgaacatatggatgtccgctgctgggatgggcctgacgggcacaatgggaatgggcatgcccaacatagacatgacttctggaactgtgcaacccaagcaagatgcctttgcaaatttcgccaattttagcaaataagagattgttaaagaagcagattgaatgaaga

SEQ ID NO: 48592 - DNA, 393 bp, Gossypium hirsutum
  Clone ID: LIB3196-054-P1-M1-B12
atcttacattaagaaaattggctacaaccccgacacagtagcatttgtgccaatttctggttggaatggtgacaacatgctggagccaagtgctaacatgccttggttcaagggatggaaggtcacccgtaaggatggcaatgccagtggaaccacgctgcttgaggctctggactgcatcctaccaccaactcgtccaactgacaagcccttgcgcctgcctctccaggatgtctacaaaattggtggtattggtactgttcctgttggccgagtggagactggtgttctcaaacccggtatggtggtcacctttgctccagtcaacgttacaactgaagtaaaatctgtcgaaatgcaccatgaagctttgagtgaagctcttcctgggga

SEQ ID NO: 48593 - DNA, 406 bp, Gossypium hirsutum
  Clone ID: LIB3196-054-P1-M1-B2
atgtgcgcgccctggaggaggccaacgccgacctggaggtgaagatccgtgactggcacctgaagcagagcccagctagccctgagcgggactacagcccctaccacaagaccattgaagagctgcgggacaagatcctgaccgccactattgaaaacaaccgggtcatcctggagattgacaacgccaggctggctgcggatgacttcaggctcaagtatgagaacgagctggccctgcgccagagcgtggaggctgacatcaacggcctgcgccgggtgctggatgagctcaccctgtctaagactgacctggagatgcagatcgagagcctgaatgaggagctggcctacatgaagaagaaccacgaggaggagatgaaggaattcagcaaccaggtggtcgg

SEQ ID NO: 48594 - DNA, 353 bp, Gossypium hirsutum
  Clone ID: LIB3196-054-P1-M1-B3
ttttacaactgttcgagacccctccacgagaagcattagaatttcctgaagcaaacaaggaaagaagtattcatatccttcaatctttttctatgtaatttagtatagtaatgtttttatattcacaaaaaaaattaactcaattttatctcaaattttttttccctagtttcacctctgcttttagtcatcctaactttagaagcaaatcattatgattttagtaaacaaagcattatgaagtagaatttttttttaaaatcgaaaaagtaagaggaaattggatagacaaaatttcaaatgttgctaaatacaagatatgacgatatatcttcagagtaaaaataccaaaa

SEQ ID NO: 48595 - DNA, 384 bp, Gossypium hirsutum
  Clone ID: LIB3196-054-P1-M1-B4
aaaagaatatgctaaatttcaccaattgaagcctcaatgctgcagcaatgccatagccttaaacctgacaggaacaaattggaaacttcatacttaaagagctccacatcagcttttgagcttaacccatcttttaatcaagtgctgatagtatccgggaaccagaaagaataggctagacaaacatgtaaaggcccaaaacatttctaataggaaaaaaatagaatacgaaaggggtttgatctagtctatcttctttaagggatgatataaatatcatatttctcaaaaaataggagggcagccgctgagattgaacaaacagaacaaaaactttcagggtaagagcgtcggaaaagaagcagataagaggaggaagaacaa

SEQ ID NO: 48596 - DNA, 373 bp, Gossypium hirsutum
  Clone ID: LIB3196-054-P1-M1-B6
cggacgcgtggggccgattccgccaccgcgtcttcccccctcaaagtcattgctggagctgattctttcggcgccgagctaaaagacgccatggtatcccacctgcgctccctcaacatagaagtcgaagatctcggaatcacctcctactacaacatcggtgctgaagtcggccgtcgagtctcttccgccaccacctacccctccgtggagacccgtggcctccttgcttgcggaacgggcgtcggagtcgggatcttcgccaacaaattccccggcgtattcgccaccacatgtctcactccggacgaagctcgcaacaatcgctccatcaataactgcaacgtcctggcactctccggcatgtcaacgt

SEQ ID NO: 48597 - DNA, 383 bp, Gossypium hirsutum
  Clone ID: LIB3196-054-P1-M1-B7
cggacgcgtgggagctattcaagagcataagcagttctgtgattgatgatgggctgatcaacaaggaagagtttcaattagcactgtttcagaataggaagaaggagaacattttcgcaaatcggatttttgatttatttgacgcaaagaagaagggagtcattgattttggtgactttgttcgagcactcaatgtcttccatccaaatgtctcacaagaggacaagatgaattttgcgtttagactctatgacatggatggaacgggttttattgagcgtaacgaggtcaagcaaatggtgattgcactgttatgtgaatctgaaatgaagttagctgatgaaaccattgaggcaattcttgataagacattcttggatgcg

SEQ ID NO: 48598 - DNA, 399 bp, Gossypium hirsutum
  Clone ID: LIB3196-054-P1-M1-B8
atcccgcctggggcctccggacattgctccctgaaccctcggaggtggcggtggatcttactccttccagccagtgaggatccagcaatcttctccgtgcctccccccgcgcctgttggttggaagtgacaaccttgaagatcggccggttggaagtgaagaccttgaagatcggcgggcgcagcggggccgagggggcgggtctggcactaggtcccgcccctgcacgccaggaaccccagaggaagtcgcagttcagcccagctgagtcctgtctgcagaatccacaccaaccagcatcatgtccatgacactggggtactgggacatccgcgggctggcccacgccatccgcctgctcctggaatacacagactcaagctatgaagaaaagaagta

SEQ ID NO: 48599 - DNA, 399 bp, Gossypium hirsutum
  Clone ID: LIB3196-054-P1-M1-B9
atgccgcggagccgggcggagctggcctgcggctcccgtggccggctctccggccggagacatggcccgggggcccggcccgctaggcaggcctcgcccggatacggtcgccatgcccaagagaggaaagcgactcaagttccgggcccacgacgcctgttccggccgagtgaccgtggcggattacgccaactcggatccggcggtcgtgaggtctggacgagtcaagaaagcggtagccaacgctgttcagcaggaagtaaaatctctttgtggcttggaagcctctcaggttcctgcagaggaagctctttctggggctggtgagccctgtgacatcatcgacagcagtgatgagatggatgcccaggaggaaagcatccatgagagaactgtctc

SEQ ID NO: 48600 - DNA, 81 bp, Gossypium hirsutum
  Clone ID: LIB3196-054-P1-M1-C1
tccgccaacgcatccgacgattcgctgagtgatgattcgcacttacctgttgatgcattcttatgcgaccattaccggatg

SEQ ID NO: 48601 - DNA, 374 bp, Gossypium hirsutum
  Clone ID: LIB3196-054-P1-M1-C10
cggacgcgtgggtttttatagatagttttcatgaataaaacaaaaaatcaaaataaatattacgattattacatttttaaaattttattattcataactataaatttaaccctcaaaagtctaccaattttttaatttgtccttattcttttggttttttttttcaattgcaccaccaatctttcaatttttatcaaattgatcaaatttggatggaaaaaaactaatgtatccattaattgactaacaattgatgaaattcattgatgtggcatgctagatgtacttaattattgatgtagcactattttatcttatacatcatgtcaacaaattatttaaattttataaaaaaattgaaaaaaaaagatttt

SEQ ID NO: 48602 - DNA, 371 bp, Gossypium hirsutum
  Clone ID: LIB3196-054-P1-M1-C11
ggccaatgcatctgggtttttcacgccttcagttccaaggctgaggagcaagattcagccttcaataggcgtttctcgatctgggttttgcttctctgctggaatctcgaggagggtagtgtgctcaagtgccattgaaggtgcagagaagcatgtttccccttctgaatctcgaatgcccaagcttgtcagtaaaggctgtaagttagttggctgcgggtcagcagtgccatctctttcagtttccaatgatgatctttcgaaaatagttgatacatctgatgaatggatctctgtccgcactggaatacgaaatcgacgggtaatgtcaggaaaggaaagtttgaaaaagctagcagttgaagcggcac

SEQ ID NO: 48603 - DNA, 367 bp, Gossypium hirsutum
  Clone ID: LIB3196-054-P1-M1-C12
atttctcatcgttttttttttcttttactactttttactgaccaaactcatccttttgtatgctttaatgcttctatctgatttttttttttaccgtgattcttcctctttttctgataagaattattggattatatttatcaaattgggtttttttgttctgcgtttggccttttcccttggatctcttatattaaagtggaataatttgagacgaacaagggcttttagggttttctacggatagaacccatttcatgcttttaatggccatctccgctagatttgctcatccctgtatatattgctcctttaatgatttttcagttcctttcttttgttattgaatcctttagatcgttctgat

SEQ ID NO: 48604 - DNA, 387 bp, Gossypium hirsutum
  Clone ID: LIB3196-054-P1-M1-C3
cccacgcgtccgagttattcctgtctttgtgctatcattggctgatgttgatccacaacttatgatggaagatgaaagctttgtttggactggaaatgatgttgtcatagtacttgagcaccaaagtccaaatatacctctgagttatgtttctgagactgagagaaggcatgctattccatcacaagcacagcgccatattgtagcagggcttgcttctgctgtgggtggtttgagtgcaccatatgaaaaagcttctcatgtacatgaaagacctgttgtgaattggctctgggctgcgggttgtcacccgtttggaccattctcaaatacatctcgaattagtcaaatgcttcaggatgttgcactgagaaatacgatttatgc

SEQ ID NO: 48605 - DNA, 393 bp, Gossypium hirsutum
  Clone ID: LIB3196-054-P1-M1-C4
atccgcggtgtctctagctgttcaactcggtttgtctctgggggatcagctggaggctacggaggcggcatgacctgtggctttggtggaggggctggtagtggctttggaggtggctacggaggtggccttggaggtggctttggtgggggttatgctggtggctttgttgattttggtgcttgtgatggtggcctcctcactggcaatgagaagatcaccatgcagaacctaaacgtccgaatgggttgctacctggacaaggtgcgcgccctggaggaggccaacgccgacctggaggtgaagatccgtgactggcacctgaagcagagcccaactagccctgagcgggactacagtccctaccacaagaccattgaagagctgcgggac

SEQ ID NO: 48606 - DNA, 379 bp, Gossypium hirsutum
  Clone ID: LIB3196-054-P1-M1-C5
catcaacagccaccggtgagggttgtgataatatgaccatgatcttggtgcagttcaagaaaccgatcaaatccacctcatccgcagaggagcaatcctcgaattccgaatccactgaaactgaaccaaagctagagggaaatgcagaaaagtagttgctgcaactgttgggggagccttggaggtgtcagatcctctgattgaagatttgacgaccctttggttcctcaaatattgtggtatgcatttgtagatgggttagagaaggaatgaattgacatatatatatatatatattatatgcaccaccacattatgacaaaatagcatgtacagaatgttttctgggtcatggatcttgtgttaaaagaatctttat

SEQ ID NO: 48607 - DNA, 374 bp, Gossypium hirsutum
  Clone ID: LIB3196-054-P1-M1-C6
cccacgcgtccgaaaaatttccccaatttattttttcaatcacaaacaattcagtaatagtttattggttctttccttttaatttatttttgaattgaaccgggtggttcaatcttatacataaggtccaatggctggtggctctgatgcggcggagacgctttcatgtgctcgttgtagcaatcctgctagccttcagtgtcctaagtgtgtggagttaaagcttcctcgtgaaggtgctgccttctgcactcaggattgtttcaaggcttcttggagctcacacaagtcagttcatttgaaggcaaagctgtcttcacttggtacggatggtgctggtggacaaaactctgatttagctagtgagggttggc

SEQ ID NO: 48608 - DNA, 383 bp, Gossypium hirsutum
  Clone ID: LIB3196-054-P1-M1-C7
tgttttggtacctgctgcttttctcattgcgggttccatagccggattcttgacctccggagcatttgggatcactggactgtcatcgctgtcgtggattgctacttatattcgtggaagcaggggctctatgtctcaggggctagacccagtgaagtggcccttgccggacacggcagtgagtatggagcagaagatccagaataggagccaaggaggaggaaggatctctgagggaggcagagaacaggaaggtggcaagagtaagacacaagaaggtggcaagagtaagacacaagaaggtggcaagagtaagacacaagaaggtggaaacaagactgtgggttgaagtttcctattgtagcagtcggctgatatgctag

SEQ ID NO: 48609 - DNA, 378 bp, Gossypium hirsutum
  Clone ID: LIB3196-054-P1-M1-C8
agttactaatcattatgaactattcagggcaaagaagataagtcgtgatgattttgtcaaaaagctgagattgatagtcggagatagtttgttgagatcaacaataacatctctgcagtgcaagtttccatctagacatgaattagaggcggcagcagcggcaaagcagaagaacacgaatggtcctggcggcctttgaacgtggtgatctcaagttgacggttgtctttcagtttggtgcttgttacaaaatgtgtcgacatgatgtggatatgtttattgaaggtaatgtttctcgtaataatggtgtaattgctaggtgtctctctagtaatgaggatttggctatgctgacgacttgttttcatcggaactgtc

SEQ ID NO: 48610 - DNA, 383 bp, Gossypium hirsutum
  Clone ID: LIB3196-054-P1-M1-D1
gtttttcttttatatctaagatggcttacattaataccctactcatcatgttctttgttttctgttttccttcaatggttctttccgaatcgttccgatcgattcaattgccaccgaatgtcacgggtcccgaatccattgcctttgagctggcaactggacgattttacgtcggtgtaactgatggtagaattttgcaatataacggaccaactgttggatttatggagtttggttccaccggtcgaaataggactaagacgatgtgcgatggcattactgatccggatttgggtccgatgtgtggaagaccattaggtttagggttccattacgctacgaatcagttgtatgtttgtgatgcataccttggtctcatggtg

SEQ ID NO: 48611 - DNA, 371 bp, Gossypium hirsutum
  Clone ID: LIB3196-054-P1-M1-D10
cccacgcgtccgctcaaggctgccaaagggcttggcacctttacagaacaatcaaactgctatgatgtacaaacagggagcaacggggattggggccattacttttattatgggggccctggtaaaaaccccaattgtccttaagagcaagagggaaaagcacctttttctttttggcgttgtgttttctacctttgttcccgtgtatcattcaaaccctagtgtactgtctcctcttatatatctttttggtttttactattaggttgggttagtaacctctctagcggaaaatttagttttgattctggttgttttacttgaaaaagatcccatcccatgtaagtggtctggaattcggccaagtttct

SEQ ID NO: 48612 - DNA, 372 bp, Gossypium hirsutum
  Clone ID: LIB3196-054-P1-M1-D11
cactctttgacgatagccaaacatcatatattgactttttttccttaaatactcctgttgaggattccacttacaaaatctgcatctatggtattgaaatctatggatatggatatacgaaagttgatcttggttttgtttttgttggctctagtttttggtgttgctgagagttttgattaccatgagagcgacctggcctcagaggagagcctgtgggacttgtatgagagatggaggagccaacatacagtctcgcgtgacctggaggagaagcaaaagcgtttcaatgtgttcaaggagaatcttaaacatatccaccaggtgaaccagatggataagccttacaagttgaaactgaacaagtatgct

SEQ ID NO: 48613 - DNA, 385 bp, Gossypium hirsutum
  Clone ID: LIB3196-054-P1-M1-D12
atcccggtccgccctgccctggaattacaaaagtcttagactgtgcctgagtgcccagcctccttaggagaccctcccaggcagcctgagtgccagacccgggagctgggtgctctggccctgcctgcctgcctctcactggaccctctccttccaggtgcggcttcaggtccagagcatggagaagcctcagtaccgtgggacgttgcactgcttcaagtccatcatcaagcaagagagtgtgctgggtctgtacaagggcctgggctcgccgctcatggggctcaccttcatcaacgcgctggtgttcggggtacagggcaacaccctccgggccctgggccacgactcgcctctcaaccagttcctggcaagcgcggcggcg

SEQ ID NO: 48614 - DNA, 376 bp, Gossypium hirsutum
  Clone ID: LIB3196-054-P1-M1-D2
ctccaccgccctgtcaataaccctggacaattccagaaattcttcccttctggacaggaaaatcctcagtcatatttacgaatcttcagccgtgaaattcttgaggctgtcttcaatacacgaagtgagcagctagacgagctgtttggtgggaggcaaagccatcgaaggcagcagggacagggaatgttccgtaaagccagccaagaacaaataagggcattgagccaagaagctacttcaccaaggggaaaaggtagcgagggatacgccttcaacttattgagccaaacccctcgctactccaaccaaaacggccgcttctatgaggcttgccctcgtaatttccagcagcaactccaagaagtggattcct

SEQ ID NO: 48615 - DNA, 386 bp, Gossypium hirsutum
  Clone ID: LIB3196-054-P1-M1-D3
agaaggttcagagattttagagagaacaaacaacaatggctgctacatctggggctgtactaaatggattaggctcttcatttctttgtgggggaaagaggagccaagcccttttgggtgccagcattggggccaaaggctcgccctcccctactgctggaactagaaagttgatcgttgtggtagccgccgcacctaaaaagtcttggatccctgctgttagaggtggtggcaacttcattgaccctgaatggctcgatggatcgctccctggagactacggatttgacccactaggtcttggaaaagacccagcattcctcaaatggtaccgagaagctgagctgatccatggacgttgggccatggctgctgtcgtcggcatc

SEQ ID NO: 48616 - DNA, 377 bp, Gossypium hirsutum
  Clone ID: LIB3196-054-P1-M1-D4
cgcgtgtcggatcgtgtcgacacaagtactgcatcccaaattgctccgagcccggagatggctcaaatggctcaaatggtttgtggctcttgtcgtcaattgctttcatatcctgaaggaactcggcaagctaaatgttcatgttgtgaaacagtcaactttgtactggaagctcatcaggttggactggttaggtgtgacagttgtgcattgttgctgatgtacccctatgggtcttcgtcagtcaaatgttcatcttgcctttctgtgacagaaattggggaacacaataggcgccctccatggtctgttcaacaggggcaaccaacccctcccaactctgtgcattaaactgctccaatgcctttctaatccat

SEQ ID NO: 48617 - DNA, 391 bp, Gossypium hirsutum
  Clone ID: LIB3196-054-P1-M1-D5
atctctgtgactgcctatgtgagaggcagagagggcgagtgcctgcgagagagaatgagcctcccaccagacaggagggagatgtgcgtggatgtgtgtgatgtgcacatgtggccagaggcgtgtgtgcgagaccgacactgtgatccctgtgctgggtccggggcccagtgtaacgcctgtccccagccatgctgtggttacctctccttgctaccctgtcatcttgcacctcccggagtgagcagcgaggaacagcagcactggtcccaagcagaggccttgccctgctgggaccccgggagtgagagcagcccaaggatcccagggtgcagggaactccggagctgcccacctcctgctgccccctctgtacacgcagccagtcccc

SEQ ID NO: 48618 - DNA, 377 bp, Gossypium hirsutum
  Clone ID: LIB3196-054-P1-M1-D6
aaggtatcatgagggaggttctcttggacttttatacaagttcaggaaagaggaagcctgatcaaattatcatattcagggatggagttagcgagtcgcagttcaatcaagtattgaacattgaactggatcaagtaattgaggcttgcaaatttcttgatgagagttggaaccccaagtttgtggtcattgtggcacagaaaaaccatcatactaagtttttccagcagggatctcctgacaatgtcccgcctggaaccgttatagacaacaaaatctgtcatcctaagaacaatgacttctatctttgtgcccatgctggaatgattggaaccacgaggcctactcattatcatgttctcttagatcagattggg

SEQ ID NO: 48619 - DNA, 383 bp, Gossypium hirsutum
  Clone ID: LIB3196-054-P1-M1-D7
cccacgcgtccgtttaaaacgagtattttaaaattttcaaaaaatttaaaaatgtttggatttgtaaatgctttgtttggataaataatttatttaagtttacaaattataaaataagaatcattatatcaaaaataaatcatataaatatattcaatataagtatcattatatttataaaattttataaatagttttaataaaataaattttaatatatattataattaaataaaaatgtttttgaagtttaagttttttatattgcaatgagatcatatatattaaatcaaataaaattacgagaaatttaaaaaaaaattatttaaatgaattttgaaaaaaattaaaattattttttgaaaattatttataaaattcga

SEQ ID NO: 48620 - DNA, 382 bp, Gossypium hirsutum
  Clone ID: LIB3196-054-P1-M1-D9
cggacgcgtgggaaaaaagtttaattgagttatcggatcatggccctctctactcgtatcctctcaaaatctcgccagctttgtggtagtcaatctattctacaaaaggagaataccattcctgttcgtttttatgccaaagaggctgctgctccccttgctaataagggagatgagatattgaaaaatatctttttggaggttaaggcaaaatatgagacggcattgggaatatttaggaaggagaagatcaccattgacccagatgaccctgctgctgtttctcagtatgcaaaagttatgaagacagttaggcagaaggctgacttgttttcagaatctcagcgcatccagtacaccatccaaatacgagctcaggacg

SEQ ID NO: 48621 - DNA, 381 bp, Gossypium hirsutum
  Clone ID: LIB3196-054-P1-M1-E1
ggaggttctcttgattcaactgagacggtgcgaaactatgaacttttggagatggaatctgttgaatgccatgtttccaaaaaaatcaatgactgctgttacgatccagagtctccttgggctggggatgggaaggctgagccatggtggcgcacaacagataaagatgagcttgcctctttggttgcacagaagtcgttggatttcattgagaattgtgatcttcccccacctcagaagatgcatgtaagaaggtacttgtgtgcatcttccggttcttatggcggtaatcggaagtctgaagcaggccctatgcttggtccaatcctcaatgcgcagggctctcctgattctgtaataactcttggaagaaagatgcag

SEQ ID NO: 48622 - DNA, 331 bp, Gossypium hirsutum
  Clone ID: LIB3196-054-P1-M1-E10
agcttttattcttctatggggtggctggaccacaacacaactgaattctcggtctgatcatgtactttaaacatctatgacaggttggataatggcaattgtgatggccctttagagtggatttgctggagtcgacaccgaggctataattaagaagcgcccatcaaggaatataaatgtgcagaatttttggttggatattttcggaatgaccttcaatgctatagcaatactgatacaagattttgatgctgtcatgaacaagggcttcttccatggatactcgataattaccactctcatgatccttaatcatgcactaagtggaatt

SEQ ID NO: 48623 - DNA, 371 bp, Gossypium hirsutum
  Clone ID: LIB3196-054-P1-M1-E11
cccacgcgtccggaaaaccagactcctttaactggtgtgcggggtcccttgttggatgaagtacatcaacagctgaattcatggatatcacaggttaccagggtatacaagggaaaagagcatgctgaggtcgagttcagtattggacctattcctgtgaatgatgggataggtaaagaaatcatcactcaaattacaacaactatgaggaccaacaaaacgttctatacagattctaatggacgtgacttcattaaacggattcgagattttaggaaagactgggaccttcaagttaaccaaccaattgctggaaattactacccggttaaccttggaatctatgtccaagatgatagcacagagctctc

SEQ ID NO: 48624 - DNA, 428 bp, Gossypium hirsutum
  Clone ID: LIB3196-054-P1-M1-E2
cgcgacaccaactaacaagagggaacgctgaagcacgctgatgccccgccccaatatccgcgatagaccatagacgacctgtcgaacaagatggttacaggctcagaggacaatgccaacgttcttttctagattgacaatgcaccgcatggccgcggatgactaacgtaccaagtatgagacagagctgaacctgcgcatgatgtgcggtggcctgaatgaacgacctgatgcagggtgctggatgaactgaccatgtccagagctgacctggagatacagatcgtgagcctgatggtggagctggactacctgtaaaagaaccacgaggaggtaatgaatgccctgacaggccatgtggctggagatatcaacgcatagattgaccctgaacctgtcaatgacctgagccatatcttaaacgagat

SEQ ID NO: 48625 - DNA, 374 bp, Gossypium hirsutum
  Clone ID: LIB3196-054-P1-M1-E3
cccacgcgtccgctcagtgtttgaggctagacttggtagttggaggtctcagagtgatagtgtttgatttggtttaggtaaaattgtcataagttttgtacggttggtttaagactttttataaagcaattatataaagtgtgttacaaagtttttatgttggactttcgtaaagtgttctttggaatgaactttagtaactgtggattttatgtctgaatgttttgacgcgggtttcatattgtttcaaaacatatctaagttctatttagtttccttaagttgaaacgaacaaaagggttttcttgatttgaattaaagtttttgtatctgccaccttcggtgtctaaacgtaacctccgaaattcgatcta

SEQ ID NO: 48626 - DNA, 372 bp, Gossypium hirsutum
  Clone ID: LIB3196-054-P1-M1-E4
cccacgcgtccgattgatttcttattcgagatgccagaaatttctgctataggaaacaatgcgacgctattcaactcgggtgtgatggttgttgagccatcgaattgtacattccagctactaatggatcacatcaatgagattgaatcatacaatggtggtgatcagggttatctgaacgaaatatttacttggtggcatcggattccaaaacacatgaacttcttgaagcacttctgggaaggtgatgaggtggagaagaaacagatgaagactcgcctctttggagccgatccaccaattctttatgtcatccattatctgggaaacaagccatggctatgcttgcgggactacgattgcaactggaat

SEQ ID NO: 48627 - DNA, 372 bp, Gossypium hirsutum
  Clone ID: LIB3196-054-P1-M1-E5
gtccatcttcaattaaagcgaaatgagttgaccttcccaattccgaaatttaactagctttacccttcacgcatgctttgttaaaattgttccaattataaagtattcttgtacttttcataaatttaaattttagtccaagtaattttatttttaataatttaatcccttacatttaaaattttaaaatttaggtccaactgttaaaattattttattaattcaagtttattatagttccatttatttagctatatggctaccaaataagtattttttttatttcaaaaagtaatacaaaaaaattaattaaaaatttttaatagtgttaacaattagacttgaattttcaaatctgaaaaattaaatgac

SEQ ID NO: 48628 - DNA, 392 bp, Gossypium hirsutum
  Clone ID: LIB3196-054-P1-M1-E6
atagagagtactgcaaaatgccatgcaaactttaaagagaatggcccgtttactaattgctgcccttctgatgtctttatgtatagttctgatagaattttcaccagtctgtgtatctctggagtgagatctgtgtgcaaagtgacatacaattggaaagccatttttgttgtaaagacattgtttttccgacttttccgatgagttagaaaaatgtttgtcattgctttaaaatcatagctgttctgcttaagaggaattgaatttaaaaatgagagagtattaaaactcacgtggcagtatcctggtcttaatcagatattgcagtgttcaaacgaggtatggacacatcaacatattcacctttttgaaggactagtgacttgtttaaa

SEQ ID NO: 48629 - DNA, 347 bp, Gossypium hirsutum
  Clone ID: LIB3196-054-P1-M1-E7
attgacgagtgctatgacatggaactctacgagtggaagaaggttgacctctcagatgcatcccagaaggaacgggtgaatcagatgattgaagactgcgagccatttgagggagagcctctcttggatgccaagtgctttaagtgaatatgtcttggttttatgttgcttgctactgttctgcctgtcagggttttctatacggtcagttttttcaggttcggacttatttttcttttctcccctttttgagtctggttcagccaacattacaattaagttttaagttctcagatgttgattatggaacgtgttatttatgttattaaggaggtatggtttttgtt

SEQ ID NO: 48630 - DNA, 401 bp, Gossypium hirsutum
  Clone ID: LIB3196-054-P1-M1-E8
atcagcaattgatgctgatgatcccaatgccctcaatgggatgttgaggtacagaatcctgtctcaggctccaagcaccccttcacccaacatgtttacaatcaacaatgagactggtgacattatcacagtggcagctggacttgatcgagaaaaagtgcaacagtatacgttaataattcaagctacagacatggaaggcaatcccacatatggcctttcaaacacagccacggccatcatcacagtgacagatgtcaatgacaatcctccagagtttactgccatgacgttttatggtgaagttcctgagaacagggtagatgtcatagtagctaatctaactgtgactgataaggatcaaccccatacaccagcctggaatgcagtgtacagaatca

SEQ ID NO: 48631 - DNA, 397 bp, Gossypium hirsutum
  Clone ID: LIB3196-054-P1-M1-E9
atagctgagatcacagacaagctggggctgcactccctacgccacaggaactggtacattcaggccacctgcgccaccagcggtgacgggctctatgaaggactggactggctgtccaatcagctccggaaccagaagtgaatgcgacccccctccctctcactcctcttgccctctgctttactctcatgtggcaaacgtgcggctcgtggtgtgagtgccagaagctgcctccgtggtttggtcaccgtgtgcatcgcaccgtgctgtaaatgtggcagacgcagcctgcggccaggctttttatttaatgtaaatagtttttgtttccaatgaggcagtttctggtactcctatgcaatattactcagctttttttattgtaaaaagaaaaatc

SEQ ID NO: 48632 - DNA, 379 bp, Gossypium hirsutum
  Clone ID: LIB3196-054-P1-M1-F1
cggacgcgtgggatttcattttcatattttccatattatatatttcacaattgttctcgtgctttgctctctacagcaaaagccaaaagcttctcttcttttttttttttttccttaaacagtatcctttagggtttttattcatttttttattcgactctgaagcttttagcaatggctttttcttctctcttcagatccaccgccgccgcctccgcctttctcatcgaggccgcctccgatcggtctgacctatatctctcaccctctgatcgcctcaaggtttccagccttggttttggtggaaatttcaactccttttttggtgcctctgtttcaactagatcttcttcattacagaaatgcaactcaaggagca

SEQ ID NO: 48633 - DNA, 368 bp, Gossypium hirsutum
  Clone ID: LIB3196-054-P1-M1-F10
ctttcataaaggcgctgggattggccaaaaaatctacataacacatttcagagtttctaaaaggggccttttagaatcgatgacgacgcttcagtgttttgattagccataccaaacctgaaaagacccaaaataactctccgatctcgttactgatttgcttctccatcccaaatcattgaatcgtcgattgaggtgtcattaggagcctaattgttgtcaatctacttctactaccttatgcgcgaaagagggaatagctctagcaagataagtttctacatttctttttagtccctctattgccaagagacgtgcaacaccatttgcatgttttgacacataatgaaaaacgcagtgttgatacc

SEQ ID NO: 48634 - DNA, 146 bp, Gossypium hirsutum
  Clone ID: LIB3196-054-P1-M1-F11
cacgggggaggaaaaattcaaattggcaaggggggtcctggattgggaatttaaaaaactagattggggggaatcggttccatgggatggccaatggggggaggggacaactttttgcttggaagtgggcggggaaatataagggg

SEQ ID NO: 48635 - DNA, 392 bp, Gossypium hirsutum
  Clone ID: LIB3196-054-P1-M1-F12
atatttttatatctacagacgtactcttcacttatggtggcgttttatcctgtcacatatataaataaatatatatatatatagcaaacagccttgcaaatcatcggccagaaaagctgcagggcattggcagggcctttttctacctggttggcacctgggggggggggtaaccaggatattggaccggctgataattcaaaactggtaatactggccagggggtccaaggaaaagttgcccaaatattccatctaactggtctctaccccaaatcccaaaaggcccaaatttccctttggaattgggtgactaagtgtagtctgtggctgacctagaaggacacaaagttatcaagagtttcccttcctagaagatgaatgttacctttt

SEQ ID NO: 48636 - DNA, 385 bp, Gossypium hirsutum
  Clone ID: LIB3196-054-P1-M1-F3
agcgcataagaaaaggccgtggcttcactgaccgttattcctttgcacgtcggtaccgtacaccttctcctgaacgttccccgcctagatcctatgcttatggtggaagaaatgttccagaaagaaaccatgatagatattctagctacagaaatcattctgatcgatcaacacgaagacgttatagaagcccgccaagaggccgtagtccccctagatatgaaggcagaaaaagtaggagtccttctcgcagcccagttcattaccggagaagatacagagatcatagtgagagccagagtcctgttcgaagtcctagtcctagagacaaacgacctgccataagtgaggggttaaaatctcgtcttggtcctcgaatcgatga

SEQ ID NO: 48637 - DNA, 392 bp, Gossypium hirsutum
  Clone ID: LIB3196-054-P1-M1-F4
atgaataatcctttgaaaaggatgaaggaggaagatattttggatcttctggaacaatgtgaaattgatgatgaaaagttgatgggaaaaactaccaagactcgaggaccaaagcctctgtgttctatgcctgagagtactgagataatgaaaagaccgaagtactacagcagtgacagcagttatgatagtagcagcagctcttcagaatctgatgaaaatgaaaaagaagagtaccaaaataagaaaagagaaaagcaagttacatataatcttaaaccctgcaaccactacaaatttattcaacaacccagctccataaggcgttcagtcagctgccctcggtccatctctgctcagtcgccttccagtggggacacccgcccattttc

SEQ ID NO: 48638 - DNA, 301 bp, Gossypium hirsutum
  Clone ID: LIB3196-054-P1-M1-F5
atgaacaagattctcacggccacagtggacaatgccaacgtccttctgcagattgacaatgcccgtctggccgcggatgacttccgcaccaagtatgaaaccagaactgaacctggccatgaatggggagggccgccataaatggcttggccagggggcctggataaactgaccttggcaggagctgacctgaaaatccaaatgagagcctgaaagaggagctggcctacctggaaaagaaccacgaggaggagatgaatgccctgagaggccaagtgggtggagatgtcaacgtggagat

SEQ ID NO: 48639 - DNA, 347 bp, Gossypium hirsutum
  Clone ID: LIB3196-054-P1-M1-F6
agccttcggaccccggacccgagacccgtggcgggggtcgacaccagggggtaacagacttaattcacttatttacaggccattttaaaaattttcagaccaggtggcttactgggtgactgggcccttaaaaatcatatcttgaggtccaaaacttggaaataaagttcggaaaaacttcctggaactagactcatatatccatctaaaaatttttttctagaatttttgggcgggccaattaggacattttattaggtaaagagttccctgtgtacacgggtcgactgtgttgaccttcttgcattacgacttatatatattcctgtgcagggattaaatactta

SEQ ID NO: 48640 - DNA, 377 bp, Gossypium hirsutum
  Clone ID: LIB3196-054-P1-M1-F7
cccacgcgtccgaaatgatttagtgatcgagactcgagaaaatagcctgactggaatatgaataataatgagaatttggcaagaacttgttaataattttcttcttattttcatacaaacttactaagcttaaagcttactccccctttcctttttctcttagtgttgtcaggtcgacttggggttggagatcgtcggaggcagcatcacactatcaagtcaccacttttggagtaatgatgcatatgctagtaatttcaagtgagtggcatgtatagggactagacaaatgatatgtgttattatgatttagtcaaatatgttggctatattgagttatttgtatattgccttgagatgtggctcatattgattat

SEQ ID NO: 48641 - DNA, 377 bp, Gossypium hirsutum
  Clone ID: LIB3196-054-P1-M1-F8
tgggtgttgtaatcattgacggatcgacggtgagagcctttgtgactgacgaccagcagttcacgaagagcgtggatgagcgtttcgcagctcttgacctcaacaacgacggtgtcctctccaggtccgagcttcgcaaggccttcgagtctctgcgtctcctcgagtcccacttcggtgtcgacgtcgccactccccccgacgagctcactcagctttacaactccattttcgagaggttcgattgcgatggcagcggcaccgttgacctccaggagttcagatctgagatgaagaagattctgcttgctattgctgatggattgggatcttgccctatccagatggttcttgaggatgatgaccaaagttttctg

SEQ ID NO: 48642 - DNA, 381 bp, Gossypium hirsutum
  Clone ID: LIB3196-054-P1-M1-F9
ctctctcctatactaacttcttccacttaaaagcaagttagctagctagggttttttgagccagagagatgggttcgaaaagaacagcatcactagccctcctctttgcactcaacatcctcttcttttccctggtgagtgcttgtggttcctgcccttcccccaaccccaaacctaaacctaaacctaaaccaaagccaaaccctactccctccccatcttcttctggcaagtgccctagagatgctcttaaactcggtgtatgtgctgatttgctccgtggcttgctcaacgtcaccattggtacccctcctgttcaaccctgctgctctctcatccaaggtcttgctgatcttgaagctgccgtttgcctttgcacgg

SEQ ID NO: 48643 - DNA, 399 bp, Gossypium hirsutum
  Clone ID: LIB3196-054-P1-M1-G1
atcacgggctcgggccgccaggaggcccagaagacggacgcggagtaccggaagctcttcgacctggcgctgcagggcctgcagctgctgtcgcagtggagcgcgcacgtgatggaagtgtattcctggaagcttgtgcaccccaccgacaagtactccaacaaggactgcccggacagcgcggaggagtacgagcgggccacgcgctacaactacaccagcgaggagaagttcgccctggtggaggtgatcgccatgatcaaaggcctgcaggtgctgatgggcaggatggagagcgtgttcaaccacgccatccggcacaccgtctatgctgcactgcaggacttctcccaagtgaccctccgggagccgctgcggcaggccatcaagaagaagaag

SEQ ID NO: 48644 - DNA, 370 bp, Gossypium hirsutum
  Clone ID: LIB3196-054-P1-M1-G10
aattatctctaatccgtactgtgactgtctcgacagactatctttgatttgtgtttattgtctcagcagactttatctttgtgggttccatggagtatttcatccatgggtttacaccgatccactatcctggcatactaacttatgatgttatatagtattttatccatgggcttacttatcatacttgactgctataacaactttcatctatggtcttacactggatacctcaaaccatatactttactggcatggcgtggttcatctatggtcttagaccattaacattactatgtaccatgctcccatgacatctttcatccatgtgcttacgttacatatcctgtatctagactgtcataacttc

SEQ ID NO: 48645 - DNA, 365 bp, Gossypium hirsutum
  Clone ID: LIB3196-054-P1-M1-G11
ggaaactgaggaaaaaagaacggactagttaagagcaatggaagatgatgcaatggcaaccgaggctcctttagcaccagtcacttgtggaaggagagtccgaaatgacttggaagataaacttcctaaaccttatatggcgagagctttggtggctccggatgtcgatcacccgaacggaacgccgggccattaccataacggaatgagtgttcttcaacaacatgcggcatatttcgaccaggacgacaatggaatcatttatccttgggagacttacgccggttgtcgagccatgggatttaatccgattgcctctctttttttcaccattcttattaatggatctatgagctatcctacac

SEQ ID NO: 48646 - DNA, 367 bp, Gossypium hirsutum
  Clone ID: LIB3196-054-P1-M1-G2
ctatgtgtgcgagttcttcaaccgagcactatgtgtgcgagatcggttagtgggcactaagtgtgtgaaatgagattcgtgtaagacctcgtttgggacgaaggcattgatttgagatgttgtgtaagaccatgtctaggacatggcatcgactcgatatgtgataacatgtaagaccatggttggactatggctttaagtaaacgacgtactcagacaagtacgacgctctttaaattgacaaatgttaggaagtagaattgaagttagatgttgaattttaattagatactgatatttggtatctgagtttgaattggggattaatagatataaattgacgattgattattatttcagctgtaat

SEQ ID NO: 48647 - DNA, 372 bp, Gossypium hirsutum
  Clone ID: LIB3196-054-P1-M1-G3
tcgaggtgaaccagatggataagccttacaaggtgaaactgaacaagtatgctgatatgaccaaacatgagttcatgagtacaaggagctcaaaggttagccattaccggatgctccatggtccaaggcagatgactgatttcagacatgataaaactgacaacctacctcctttcattgattggaggacgaaaggagcagtgactggtatcaaggaccaaggcaaatgtggtagctgctgggcattttcaactgtcgttgcagtggagggtataaacaaaataaaaacaggggagcttgtgactttatccgaacaagagctggttgattgtgataaggagaaccaaggttgtgagggaggattgatggaac

SEQ ID NO: 48648 - DNA, 197 bp, Gossypium hirsutum
  Clone ID: LIB3196-054-P1-M1-G4
cctttttaataagaacttatactagtcctcctccgaggaagaagaacaacatgaacactaagttggatggagaagggcgcaacacaccagagtgtgagcccacctattaaccaaccacctatttgtagttcgtgcaagccgtacaaccacaatcattggctgcctaaacaaagaactactaatgatcggtttcggac

SEQ ID NO: 48649 - DNA, 375 bp, Gossypium hirsutum
  Clone ID: LIB3196-054-P1-M1-G5
gaaaactctgtaatgccatgaaattgatataaccaagtttaggcaaatttcttgttcttcttaattcaatttattaagtgaatttttccaacattaaccatctcttgtagatatgtagggtaggggttggaatttttgtttgtttttgttttaaataaacttctaacgaattttaaatagctttaaattttatagttaagttccaattacacttttaaattcttaagatgaggatacagattgaagttataaaaattatattagggattttcaaacacttctttaactttaaatttctttatataagtttaagttatgaaaattatattataagcataaacatgtatgagtgtttcgaataattataattaaaat

SEQ ID NO: 48650 - DNA, 240 bp, Gossypium hirsutum
  Clone ID: LIB3196-054-P1-M1-G6
aaattttattagaagaagcactctattgctctgtttctctcggtgtagcataagatcaagatcaactgttcttcaaccaaaagggaaaaagctgcttggaacgttgcactgataaacaatcaagctcaattgaatagtagaggaacttcgcattggtgttcttggaaggtcccccatttgcttccaaaggggcttattggagattattggttttgtgggcatctgaccttttaaatccat

SEQ ID NO: 48651 - DNA, 381 bp, Gossypium hirsutum
  Clone ID: LIB3196-054-P1-M1-G7
gcacaagaaaaaggtggacgcaaagaacgcgttggagaactacgcatacaacatgaggaacacagtgaaggatgagaagattggtgccaaacttgctgcagcagataagaagaaggttgaagatgcaattgacgaggccatccaatggttagacaacaaccagcttgcagagtcagatgaatttgaagacaagatgaaggaattggagagcatctgcaaccccatcattgccaaaatgtaccaaggcgctggagctgacatgggtggcatggatgaggatgccccagctagtggaaccggcgcaggccccaagattgaggaagtggactaagaaatttctctccattcttttcgacccttacatttgttcctttagtcgtt

SEQ ID NO: 48652 - DNA, 379 bp, Gossypium hirsutum
  Clone ID: LIB3196-054-P1-M1-G8
gacgattaaagaagctggatatcaccaaaactcaacctgaggaccttacacctgaagaagttaagaaatttgctaggcttgatattgacccgaattctattacgtggagaagagtgatggatgttaatgatcggttcttgaggaaaatcaccgttggccagggcccggaagagaaagggatggtgagggaaactggatttgatatttcagttgctagtgaaataatggctgttttagccctgactacgtctctcactgatatgagagagaggctaggaaaaatggtgatcggaaatagcaaggctggtgaacctataactgctgatgatcttggtgttggaggtgctttaacagttctcatgaaggatgccattaaccc

SEQ ID NO: 48653 - DNA, 393 bp, Gossypium hirsutum
  Clone ID: LIB3196-054-P1-M1-G9
atgctgtgtatgatcagttatctacctcagagtctattgtcttttgtgctgggacaggttgctggccctccctgtttccacagaccaaatcctcctagctcaggagctagggctaagcagttgtttctttcaagtattttttagttcttaaattttatgcttgtatttgatgatagatgtcagtgacatttcatagtttcaaaagtccttgctgctctgagaagtgtagattctagtgaaaattacatagtcataagagaaatgtgtttttgtttttgtttttgtttcatttttttaaaggtggggtattattggttctatgctccctggaatattactgctttgtgaaagtccagactgaacgcagcaccctctgtgtacctagtacaggta

SEQ ID NO: 48654 - DNA, 309 bp, Gossypium hirsutum
  Clone ID: LIB3196-054-P1-M1-H1
atctcctcactcacccttcctggcgctttgggctccccttgcttgttagataagatgtgtcatgtgaaaaagcacgcacccccagccaaatgggctgtggaagaccctgcggcaaagcgagcgggtgagcggactaccgtggccgggctaccgtgactcaccgtgtgcgctgcaaaccctatggctgcgtcaacaaacgaagaggtaactactcttacagcctttccgattgtgggtacactgcttgcattagccgggttaacactggacggcaccgacattgggctcatgctaaccacaccggacatc

SEQ ID NO: 48655 - DNA, 393 bp, Gossypium hirsutum
  Clone ID: LIB3196-054-P1-M1-H10
atcctcaggggtgagaacaggattgcagaactgcgcttacgccttttggaaactcgtccagtggcaggagcagcctcccaggagcagagcagacctgctcggtggtcccctcgccaaccagggacccaagaagccgctcaaggaaacacggtcccgcggtgtccgggaggtcctaacaagaaagctttctgctcatccatggctatgagttcatgccttaatgcaccccacggccagtgacagtggcagtgacaacagcgggacctgcctttgaagattggctgctgcaagggttgatggctggcatgtcgcaaagaccacccagcatgtactggtgtgtggggccggaggagtcagctgtgtgtccagaacgcgccatggagacgcttaacg

SEQ ID NO: 48656 - DNA, 352 bp, Gossypium hirsutum
  Clone ID: LIB3196-054-P1-M1-H11
cttcaattatctcatcacttgttgaaaaccaaccaaatcaaaaaaaaaaaaaaaaaattctttgatttgattgatccatagatctacatgaagtttctagcttttttcaattcccggatcttctttttttcaagtatgaaccaaagttgtcaaatttaaaagcaaggagcaggtacggtggtacggttatgactttttaagacaagctgagaaaaacaagtgtttttagtgttgtgttgaagcaaaaaaggaggatattcggttttttagggtctagtttttaaatgagaatttggaggtttttgtggatgaaatgagggatgttatcagggttaatgaatttattgagggc

SEQ ID NO: 48657 - DNA, 385 bp, Gossypium hirsutum
  Clone ID: LIB3196-054-P1-M1-H2
acgcccacgcgtccggaaaagccaactgggtatgcccgtgaagcaagggaatttttaagaacacgccttgtaggaaaacaggtgagtgtacaaatggaatattccaggaaagtccccatggcagatggagctcctgctgcatctgcagattcaagggtaatggattttggctcagtcttcctcctgtctcccatcaagggtgacggtgatgaggtttctgcagcaaacgcatctgcagctggcagccagcagcctggcctgaatgtggccgagttggttgttggacgtggctttggcactgtgataagacatagagattttgaggaaagatcaaactattatgatgcccttctggctgctgaatcccgtgctatttctgggaaga

SEQ ID NO: 48658 - DNA, 402 bp, Gossypium hirsutum
  Clone ID: LIB3196-054-P1-M1-H3
atcaaaattgatgagaaaaactttgtggtggttatggtgaccaaacccaaagcagtgtccacaccagcaccagctacaactcagcagtcagctcctgcgagcactacagccattacttcctctaccgcaacaactgtggctcaggctccaacccctgtccctgctttggctcccacttccacacctgcatccatcactccagcatcagcgacagcatcttctgaacctgcacctgctagtgcaactaaacaagagaaacctgcagaaaagccagcagagacaccagtggctacaatgctacccctgaatttgaaggtagaggaggtgatgaccttggcaccgagatcgctaacaccctctatcggatatttaacaataaaagcagtgtcgacttgaagaccc

SEQ ID NO: 48659 - DNA, 397 bp, Gossypium hirsutum
  Clone ID: LIB3196-054-P1-M1-H5
ataaaaatatgaagtaccaggaggctaaacccactggcctaagatctcaccaaagttcatgagataaccaggactaggacccacggctcccgacgcccatacttgctgtgttatgctgcctccatatctgtcaggaagagcctttccagaacgactcagcatatactaagaagagcaggtatggaaagatctattgtcaggcaatcttagaattccctatatgagtgggagaaagatgtccaaattccttacgcagtggtattaatgatgatgccattgccttctctaagtccaggactgttttcctacagtgtgcctcaaacgtgtggtagaggacaggattctacattcacagcctgttccatctacgagcttttccagatgctacttgtggtag

SEQ ID NO: 48660 - DNA, 287 bp, Gossypium hirsutum
  Clone ID: LIB3196-054-P1-M1-H6
ataaaaattctaaccacgcggacgcgcaaaccaacattacgtaggggggtagaaaaggctgggcgatgacttacattctggctaacttgatccaagtaagattcctctttggaagtgggaaacacatactacggacgaagtggccttaaagaccactaaaaaggatataacatggggcattaatgacaatgaactaaatgtggccatgtgataccttcataactgactacaagctgagaaaaacaagtgtttttagtgttgtggtgaagcaaaaaaggaggggttta

SEQ ID NO: 48661 - DNA, 372 bp, Gossypium hirsutum
  Clone ID: LIB3196-054-P1-M1-H7
gtcaactgtcaaagtttctctgtctctctctctctctctattgttgaagttcataagcttttgtatcaatggctgaagtccgtgaccgcaacctgcctcaccaagttcaagttcacccacagtaccgtttcgacaatacaaccggaggcggttacggtgcaaagaactatcacagtggaccatcaacaagccaagttctagccgtccttacacttctccccattggtggtacactgcttgcattagccgggttaacactggccggcaccgtcattgggctgatgctagccacaccgctgttcatcatcttcagcccagttcttgtcccagctgccattgccattgccatggcagtgacggggttcttgtcgt

SEQ ID NO: 48662 - DNA, 266 bp, Gossypium hirsutum
  Clone ID: LIB3196-054-P1-M1-H8
aggacacgtcggtcttccggggtagaacccaacgacgctcacccttttccttctttaaagccaaaacagatgtatgacaacccaagtatcatatgttctaagtgactgaaaaatgtgatggaaaacaaggatttacaatcctttaaagcagatactcggacatggtaccaaggcggtagcaccgagtgccgtatcgccatacgagaattggatatgaaaccgactggatgagctatggggcacactactgaacgtaacaagctaga

SEQ ID NO: 48663 - DNA, 374 bp, Gossypium hirsutum
  Clone ID: LIB3196-054-P1-M1-H9
gaacaactttcaaagtcattaatcgttatattaccttgactgctatgtcaaaattactcatatcttgtgagaagttaatagtttaaaaaattctttaattaagataaacataaatagaaatactatgtttatggtctaaaatggctgttatggcggtgtactgctgttactctttttttacaagatacataaaaaaattctagtttattagaaatgcaattttttattgatttggtgtaattaaaaaccccatcactaatataccattataaatttaaaaacttacctcatttatcagttgtttttctagattcaattaaatctagtgactatgaataaaatagaaactctttctcatttctctaacctttaca

SEQ ID NO: 48664 - DNA, 317 bp, Gossypium hirsutum
  Clone ID: LIB3196-055-P1-M1-A1
gccccgacgcgtactcccaggcgtgacccatgcctccggaggaaaacatgggttctgagcagaataaaggaactagcttgcctccattggtgacaaatcttagtgccgacagacgtggcatattcggaacggcggcggatattaactgctgttcaaagggttaccgtgccctccgtgcccgggaggagcatgctgtcaaggctcaagctgccatgggggaatccttcatcgtaaatacgaagcgggaagatgccgctgacctgactgaaaagactgctcttgagctttctcaaggaggatcctcatctactgagggc

SEQ ID NO: 48665 - DNA, 360 bp, Gossypium hirsutum
  Clone ID: LIB3196-055-P1-M1-A10
ctgtaagacattttccatcggctctttatccaggcaaatattacacgctgctgtctcatcaccttgcttgccgtctttctcagtatcccatgcctcttgacagggaactgatatcagccgactgatgtcactggtgtcaagaggcaaggcttcccttgccttagaggagctgaatggtttcagtacccccccaaacggggaagtctgaaagccctataagcagggtggtcggtccaaatgatgacgaaagaagcacggtgagcattcagccagaaagaaacagtaggtatagcattgcaggctcctcagcgcataacaatgagggccaaggaagctctctatcgctgccaagttacatgg

SEQ ID NO: 48666 - DNA, 243 bp, Gossypium hirsutum
  Clone ID: LIB3196-055-P1-M1-A11
agccgctagaagaggtgatgggtctgctggttatccagggcaacctgacagctgtggttcccaaagaccatgaatgactttaggctcagaaggccaagccagttcacacggaagagatagcagtagaggcatttcacaggggccaaggggcaaggtggaaattgccttataaaagcataatgcctataaaaccgacccagaagtcgaagtataaaagaccaataagaaatgggaacattccaa

SEQ ID NO: 48667 - DNA, 359 bp, Gossypium hirsutum
  Clone ID: LIB3196-055-P1-M1-A12
cccacgcgtccgcggcatttatggaagagttattcaattcggatattaaatgaatatcagaattactatttgaagttataaacttctttttcttttcatattcggtttcccaatcagacaatattcatggtcggcctgctttagactggacaaggcggaagaggatagccttaggtactgctagggggcttgtatacttgcatgaacagtgtgacccaaaaatcattcatcgggatgtcaaagctgccaacatcttgttggacgaagactttgaggccgttgttggagatttcgggttggcaaagcttttagaccaccgagattctcatgtaacgactgcagtccgtggtacagttggt

SEQ ID NO: 48668 - DNA, 360 bp, Gossypium hirsutum
  Clone ID: LIB3196-055-P1-M1-A2
cagtcactttcggtgccttgctcggtggaagaatctctctcgttcgggcgctgtactactggattgcccagctcttaggttccattggggcttggctcttgctccgcctcaccgctggaatgcgaccgggggggttcgccctggcgtcaggagtaggggagttgcgtggtctgatattggagatagtgctgacatacggattggtgtacacagtttatgcaacagggatcgatcccaaaagaggaagcgtggggacaatagcaccgctggctataggcttaatagtgagcgccaacatcttagtaggcggaccatttgatggagccgccatgaatccagcaagggcatttggtccagcct

SEQ ID NO: 48669 - DNA, 341 bp, Gossypium hirsutum
  Clone ID: LIB3196-055-P1-M1-A3
cccacgcgtccgtttagatcgcgagcgtacgaactttttttttttttgctctggactaatgtgatgccaaacagtgaggacgtattggggcttgtggcttgatacgactaaccgagggagtgggaccgggggggtgcgccctgggggaaggagaaggggagaggcatgaaatcataagggagatcgggacgacatacaggtagcggtaaacagtgaatgctataagtaaagagccaaagaaaggaagattggaggcaagaacacagctggatataggataaaaaatgcgcgccaaaaaagtaatggaaggaccatgggacggagccgcaaagaatccagga

SEQ ID NO: 48670 - DNA, 366 bp, Gossypium hirsutum
  Clone ID: LIB3196-055-P1-M1-A4
cccacgcgtccgtggacgcgtggggaagttgttcccgcctttgcaaggatactcttgcgcactttacttgggaagaagcacttgtttcgtccgcttctgcgaacagaaatcacacaagtggtaaatagacgtgcatggtatgatgcaaccaagttaacaacggaagttttgagcctctacaaggccccactttgtgcagaaggttgggatgaagcacttcatgagataagcaggttgtcatctgaaacaatcctttcaccacaaaatgcaacatcactgctaaaagctattgaagagatgccagtattagtcattgctggtgctgaagatgcccatatttctcttaaatcttgccaggccttggct

SEQ ID NO: 48671 - DNA, 412 bp, Gossypium hirsutum
  Clone ID: LIB3196-055-P1-M1-A5
cgcgttggtgccgggccggaatttccgggatcagacctgtgccggcacctgctgggagggacacgaggccctcccccaggcagaagagcatgccctttgccgttgcatgcaaccagccctgtgattccatgtgcagatcccagcagcctgttggggcaggggtgccaagagaggcattccagaaggactgaggggcgttgaggaattgcggcgttgactggatgtggcccaggagggggtcgagggggccgactcacaaaaggggactgacagtgggcaacactcgcatcccactggctgttgttctgcaaccatccgattggctttctgaggtttggctgggtggggaccgctcatttggccactctgcaaattggacttgcccgcgttcctgaagcgctctcgagctgtt

SEQ ID NO: 48672 - DNA, 363 bp, Gossypium hirsutum
  Clone ID: LIB3196-055-P1-M1-A6
ctggaaggggggtcaccgtggacgagcttaaggctgatgatatttcaaagaaacttgcaccgcccattggcatggctgttcatcaccagctcccgaacaaatgacttgacgggcttgacgccaatggcaataggcttaggccctacagcgccaaactagtgggcttcccacggcgtgctcgcaagttcaaggctggggattcaactgccgaaaagctcgcaactgcaacccaagtccaaggaccatacatgcctatttctcgagagaagcctttcgttgagctcgggaaggtcaccgaggacatgaaattattcaaggcatacaacaagctccgtgttgaacgtgcgaacgaactgtatattg

SEQ ID NO: 48673 - DNA, 327 bp, Gossypium hirsutum
  Clone ID: LIB3196-055-P1-M1-A7
cgacaatgggattctatgatgagagatgtaacgctaatctcgttgaacggaaaggaaggcccaccacaggattggcgcggcttgaaagagggcacaaagactgaccatcttccttgccaaaagacgcggcgatcctcaacaattcattcaagcagccggctctcggtgccggatccagccggacgacgctgtttatcaggccacacaagaatcagaaggcttgattccttggaatggaaaagaagatattttaatagattgattcagaggcctagccctaattgagtttattcaggagccggggacacgacaatttggggatcaaga

SEQ ID NO: 48674 - DNA, 357 bp, Gossypium hirsutum
  Clone ID: LIB3196-055-P1-M1-A8
aacaaaaggggtttttctgataccatggatggattctctgaggtgaaaggctatgtgtacactgagaaaagttggatgtttcatgaagctggttctgattctgaatctccacaatctgtgggacatggaatatcctggtaattcaggggttaatgtgattttgtcaacaaggtctcctggagttcaagcatttgtaaagcaagatgagcctgcaaatgtgttacaagagcaacctcgtgctactaatggaaccagtctcaagcaaactgccatttctaacaacaccaccggtgcacctgctgccaaggcgcatgttgttggttggccaccaataagacccatttatgactaaaacgc

SEQ ID NO: 48675 - DNA, 307 bp, Gossypium hirsutum
  Clone ID: LIB3196-055-P1-M1-A9
aacaaatcgaagtacgcggggactgctttcaacttttttacagaaaaatgatagctatccactaggaacggtggttgactttgcgaaggatgccaatggatttacaatattaaaagtgaggaacctggcatatcatgcaaaggccttagtgaatgatcccaaaagctcattgcttgccgatagaaatcctgcagacaggactgatttaccaatcattcctgttcgggatgcacacggtggatcctaaaaagatcaagcggacaaaagggctgcttatttggataaccacccaaatgcattttgaaag

SEQ ID NO: 48676 - DNA, 325 bp, Gossypium hirsutum
  Clone ID: LIB3196-055-P1-M1-B1
tgtacatgatgacacatgtgaaactgacgcgccgccttcatgcattggctgtggggtgatgtaacaccttctttgcggtggttattgtcaaccttgtgctgcgggtcagttatccacaccgctaaattccgatgtaagataatgtgaccgaaaaggtgaaccttctgaacaatgctggggccatggaacacttccacatgaagctttttcgtgcccagaggaatccctacattgctggtttatccttgctgatgcccttcctggttagacacctggtgactctcatttgggagcagtccacactgctggcttctaatgaagcctt

SEQ ID NO: 48677 - DNA, 145 bp, Gossypium hirsutum
  Clone ID: LIB3196-055-P1-M1-B10
tgcgagctactcattcgacagcctctcaactcgggggtcaaaattagcctacgcctgcatagatcctcatacagctattaaagtggtatctaaggtgaatctacgccacctgcgatgaaaaacgcccagacaatagctaaccaac

SEQ ID NO: 48678 - DNA, 363 bp, Gossypium hirsutum
  Clone ID: LIB3196-055-P1-M1-B11
cccacgcgtccggtttgaaaaaaaaacagagaatactcccccacccctttttctcttggagttagggtttcaacacccatcattgtcggcggttcaccgtgtcaaacggagaggggagctctgacgacgcggccacggtgtagatccggtaagactctcttcccctcctctttcctttgtctattttcgtataaaaataaaaataaaaaaacaaataatacaaaaaataaatgaaatcagaacatagaacaagactagaaataaaatcaaccttcctgtttttttgctattgtgattttgtttgctaaagttcgtgtcccccaaaaaaaaaaactacaaatggatgtttccacttttataacc

SEQ ID NO: 48679 - DNA, 378 bp, Gossypium hirsutum
  Clone ID: LIB3196-055-P1-M1-B12
atccaatatcactgattagttacatcctttgtgtgggattagctgtaaagtgtactgctcttattcttgttcagaatagtgaattggtagccaaaaatacatgtatcacagatgttaggtcgaatttaaacagcacagtcaagtgctctggaagtttttctgctaaattagtagattaaagaatactataccttagccatgggaagcagcacgttttcctttggtaggtaggatctctatactagtgaacagtgccagtttcacactttggatttagaactgttctctagttattgtaacacagaatactgtcaatccctaatttacttaatgttacttattggaagtggggctgttgaaaaacgcacaggagggaaa

SEQ ID NO: 48680 - DNA, 315 bp, Gossypium hirsutum
  Clone ID: LIB3196-055-P1-M1-B2
tgtacatgatgacacatgtaaaactgagacggcgccatcatacagtaactttgaggagatttaacacctttaggccgctggatagtgtaaaataagtgacacggggcagtactccctactgcataatatacgatgtaacgtaaagtcaccgaaaaggtgatacctatctgtacaatgctgaggccatggaaaactaccacataaagatcttcccatcccagagaaactcgtacgtcccttctagatgatccaatattgcccatcctgtgcgagcgacctgttaactctcttatttggggaattaaaacaactggc

SEQ ID NO: 48681 - DNA, 395 bp, Gossypium hirsutum
  Clone ID: LIB3196-055-P1-M1-B3
cggacacgaagtcacaggttagacccacgcgtccggtcaatccttggctcctacggggcatgtctgtgtcattcggcctgcacttcttgatcctctatgtgccattccttgctcaagtattcggtatcgtacctttaagctttaacgaatggctgctggttctggccgtcgcattccctgtgattttgatcgacgaagtgttgaagttcgtagggaggttgggacggcggatgagatcctccagtcaaagacctttgaaacccaaaacagagtgaagacagatatggtataaatccgataagtggatactagacagccaatgctagcctctaaaatgattaaaattcttgggaactgtcctctaacatggcgtttttacaatctgtgttatataa

SEQ ID NO: 48682 - DNA, 310 bp, Gossypium hirsutum
  Clone ID: LIB3196-055-P1-M1-B5
gacccatgcgtcccgcggtgacccgatcggtgggggcaggaacatggaccaccacgccctgcactttgatgtgaatgtcatcagggagtcctcgaagatgcgggtgcaacccttcaatgagtaccgaaagaggtttggaatgaaaccctacacctccttccaggagctcaaaggccagaaggaaatggcaccggagatcgaggagctgcaaggagacatcgacacaccggagtttctaccctgggctgcttattgaaaagctgccaatcaaactttatgtttaaggagggtctgagaggacattggtgac

SEQ ID NO: 48683 - DNA, 390 bp, Gossypium hirsutum
  Clone ID: LIB3196-055-P1-M1-B6
aatttaccggatatctaacaaagtgctgacattacaggcgtgagctaccaggcgcgggcctcctgctcttctttctaccgtctgctcaccattttaggcttcattctaggaagcatctttcctgaatatttcaccactaaacattctggtggtggctagatggcctagttaatctacacatttcattttatcacctccagattttttttgtgtatgtcaaccgatacattcaggggagaacgccttaatacatgaaaataataaacttgcggagcacacactaatgaccaaggacactttaactctgaacctaattcaaaccaaatagagagagcctgatagaaagcagctctgccatccttgagttagaacatccaggaagggaaggct

SEQ ID NO: 48684 - DNA, 169 bp, Gossypium hirsutum
  Clone ID: LIB3196-055-P1-M1-B7
caaaataaactcatattgcgagaggggggttgagcctccgggcacgccaaggtaattttagttaaagtttaaaaaagactgatatctcgagaggatagttcatttcaaagaaaactataaaaagggtggtttttctaatggaacaaagcttacaatcgctggcttttta

SEQ ID NO: 48685 - DNA, 191 bp, Gossypium hirsutum
  unsure (1)..(191): unsure at all n locations; Clone ID: LIB3196-055-P1-M1-B8
ccggcccgaaaacccgggcgacccacgcgaccggaacaagaccgcgagcgggggccacaaacaggggaaanacaaaaaaaaccaaaaaagacagaagaaagaagagcacagggaacacccgaaaaaaaaaagaaaaggaaaaaaaagacgaaccaaacgagagccaagacaaacaaaaaaaaaaaacaaaa

SEQ ID NO: 48686 - DNA, 401 bp, Gossypium hirsutum
  Clone ID: LIB3196-055-P1-M1-C1
tcgatgacaccaaactagtgcttggtgtcacgctggcatcatattgcaccaagcctgtgggaaggtggacttacagtccgtagatgaacacgacggatgcggacacggtcagagatagcctgatcctatgggaaatggtggagaaactaaatgtctaagtttattatgataaaaatgtggttatttggggtaatgatgcatcaactcaatatcctgataaaaattacgcaagtgttattactctatctgtagaaaagacctttagcgagcttgctaaggatgatgcatggttaatgcaataataaaaacaggatttgttgtgtgattaaataaattaatttgaaatgagatttttgaaacatcattttgaaattattgattcattaaaggttgaatggaga

SEQ ID NO: 48687 - DNA, 345 bp, Gossypium hirsutum
  Clone ID: LIB3196-055-P1-M1-C10
caaaatttttaaaaacttcacgaacatgactttatgtttatgtttttattaaacttttattttatatatttaatatggtgtgatcttactgtggatttttaaaaaataatgttgtggacaatttggctatttaatgcatggatgttattttttttcttgttaactttagttttgttaaataataaagttttatttgtaaggtttattaaggaatattttatataatcaattaatattggaaaatatttgaaaatattaaatctaatccattgggtgtattaaaatattagattttttaaaacacatcaataatttcaatttggcacttctaaatagtttaataca

SEQ ID NO: 48688 - DNA, 248 bp, Gossypium hirsutum
  Clone ID: LIB3196-055-P1-M1-C11
cccacgcgttcggttgttgagcaacagtggtggtgggtttgagacaagtttgactcatatggaagggcttaacatgtatggcaatggtgctgataatggtttgatgataaggaagagagcgatggttgtagtgaatgcaagctcgcattctaagcatgcaaagacttgggcactcactcatgaggagaacagggttggtaaagttacttatacgcaatgtttttataacaacccaaaagattcattat

SEQ ID NO: 48689 - DNA, 374 bp, Gossypium hirsutum
  Clone ID: LIB3196-055-P1-M1-C12
atctttgatctcggtggccagtacttgcgggtgggcaaggccgtcacaccgcccatgcccctactcacaccggccacgcctggaggcctcccacctgccgctgctgtggcagctgctgcagccactgccaagatcacagctcaggaagcagtggccggagcagcagtgttgggtaccctgggcacacctggactggtgtccccagcactgaccctggcccagcccctggggactttgccccaggctgtcatggctgcccaggcacctggagtcatcacaggtgtgaccccagcccgtcctcctattccggtcaccatcccctcagtgggagtggtgaaccccatcctggccagccctccgacgctgggtctcct

SEQ ID NO: 48690 - DNA, 366 bp, Gossypium hirsutum
  Clone ID: LIB3196-055-P1-M1-C2
aatcagtcatctaaaataaaactaaaaaaacctaatcactcccctttctcttgcgccggttggtgcctttatcctccattcgactccgattgcgacggagtagaaggaagatcggccaccaggtaagctcgttctcctttcccttttctttttccttcacttttctcttcttcgtataaaaaaacaaaagaaaacagtaaagaaacgcagagaaaaaaaatggtgaacccttttcaaatctgatttcttttcctttttgattgattttttttttgtatttcaatatgcgtggaaaaaaagatcctcgaaacaatacagaaatggggttttataaccccaaaaatacatccatttttccttctattt

SEQ ID NO: 48691 - DNA, 361 bp, Gossypium hirsutum
  Clone ID: LIB3196-055-P1-M1-C3
atttcatcaagagctggaaacttgactcttacaaacttaggtgctgaagcgattagtgatgtaacctcttcatcagggccagttaaattggaagacttgcaaagaatactgagcagtattggtccagcagaggtagctggtgagccagatggaggcttggggttggatgatattttgaagccagatttgataatgccattaattgagacattgtcgttggaagagcgattagcttcatatttaccagagggtcaatggacacctgaggatttgttagagttgctgcagagtcctcctttccgtcaacaagtagattcatttacctatgtacttcgaaccggacagatagatttgtttcagt

SEQ ID NO: 48692 - DNA, 355 bp, Gossypium hirsutum
  Clone ID: LIB3196-055-P1-M1-C4
catgatcacaccactgcactccaacctgtgtgactgagtaagactttggaaaaaaaaacaaaagggcagagagtagaatgagaatggtgtttaccagaggaaagagggtcgagaggatgaagagaaattggttagtgcgtgcaaaaatacagttcaatagaagcaataggttctagttttcaatggagcagattgagaaattatagggaatattaccttattgcatatttataaattgatatatgaattgtagtgtttgcaatacgaaaagaagataaacatttgaggcgattgatatcccaatcactcagattttattactgcatactatatacatgtatcaaaatattacatg

SEQ ID NO: 48693 - DNA, 336 bp, Gossypium hirsutum
  Clone ID: LIB3196-055-P1-M1-C5
ccgattctcgggatcaggtccacgcttccgaagctgccaggaaattacttggtagagaaaaccagcccctcatctacagcataatccggactgggttgattccaaaatttgagttcttcttgagcagaactgattgtagtcccagtcagttggtgtctgcttgggcactcactaacattggttctgggacatcataacagaccaaggctgtggtgagatggaggtgccatcccagcgttcatttctctggtggcatatccccatgctcacattagtgaacaagccagtggggctctaggaaacattagaagtgacggctcagtgatccgagacttg

SEQ ID NO: 48694 - DNA, 365 bp, Gossypium hirsutum
  Clone ID: LIB3196-055-P1-M1-C6
cccattcttgaattcggtgccaaaggataaggcaattcctacgtcctttatccaaccattctgcgcgccctgttgcatcacagacaaaaaaattcagagcttccaatgaattaaggatgctgaagcatatacacttgtactagttaaccagcagaaccagtaaagaccttctgcaaccaacgctgagaggaatgcttccctagcttcatgactgagcgtgcctgcaaaagagcaaaaaagttatcttcatatgtacatgaccacaaacaaatgcaccatacagtttgagaactctaattagatggcttaaccagaacttaagagaaacggttcttacgttctatcacagaatttgagaacagagg

SEQ ID NO: 48695 - DNA, 360 bp, Gossypium hirsutum
  Clone ID: LIB3196-055-P1-M1-C7
cccattcttgaattcgggggcaaaggataaggcacttcctacttacttgatccaaccattttgcgcgccgtgtgggatcacagacaaaaaggtgcagtgtttccaatgaattaaggatgctgaagcatatacactggttctagttaaccgagccaaccagtgaagaccttctgcctccaacgctgacaggaaagcttgcctagcttcatgactgagcgtgcctgcaaaggagcacaaaggtattgtccatatgtgcatgaccacaaacaaatgcaccatacagtttgggaactctaattagatggcttaaccagagcttaagacaaacggttcttacggactatcacagaatttgggaac

SEQ ID NO: 48696 - DNA, 407 bp, Gossypium hirsutum
  Clone ID: LIB3196-055-P1-M1-C8
ggggggcgccagcaggcaccgccccaatattccggatgcgaccaacgcgtccggaaactggagaattcggggggaaattataaggcattttgtattttctttatctatcttttttgctctatttgttatttcaattataaaaaaatttaatgttttcaattatttaatgttgtttaaacatattctctttttttagttaattaacattattatttaattctttttgtttcaaacgcttataggatttttttcttagctttattactgatatttcctgaataagagaaaatatgttttcttcatttgttgatgttgacttatttttgttttataaattttgagatttctattttttttgcttatctagaattttatagtttttgtttttacatattataataaaattt

SEQ ID NO: 48697 - DNA, 349 bp, Gossypium hirsutum
  Clone ID: LIB3196-055-P1-M1-C9
atgataaatgcttttgtataatcacctatttccttggaaacacctatttactaaaagagacaaagtaaaaatatatttatactttatgaattgttttcagtgactaatttctttgtaaaacttaaatatttttaagtttgtaggtttaaactgttaacttaccggtgtatttaggcaatttaatttgggttatgtatctagatgtagaaaaacttactgcattttgcccagtatctaatttacactaatacatttatgctgaaacctgtaccgtaaaacatttttaaataggtatattgagatcttcacacatagcaggagggaaatcaaaggtattttattatccacc

SEQ ID NO: 48698 - DNA, 364 bp, Gossypium hirsutum
  Clone ID: LIB3196-055-P1-M1-D1
gcgggttatgtaaagttgcttggcgccatgagcacctcctaaacatgatatgcagacaagtgatactaccggagttgaatgcagaggaaataaagagcaacttggggaacttttcaggaggtaacaccaattttgctaaagataagcaacataagctatggatggacttactttaaagaagtgaaaaaaaactgcgagagagacttgagggtattagtttttatgcttgtagaagtttggtattcaactcagccaccacttgctttgagccaggaaattggtctccttttggtatggcacaaatggagcaatgggttgcaagtaataatgatcaggtgcacgaccaacttaaaattgtggcaac

SEQ ID NO: 48699 - DNA, 263 bp, Gossypium hirsutum
  Clone ID: LIB3196-055-P1-M1-D10
gagataaataatataatggagctgcatgagcaaaaactatagtttctccaacaggggcaagcacatttcatgaatgatgatgatagggcaatcgacattgaagttctttctagatggcataaattgaaactagattatgatggcaaatctgagagttgcctaaaaacatataatgctggtgaattgttcaaggcttgcattatctgcattgcacgttgtatccattgtacatgttgcttaaaggactgcttattgggacgaaa

SEQ ID NO: 48700 - DNA, 186 bp, Gossypium hirsutum
  Clone ID: LIB3196-055-P1-M1-D11
tgcagactgcaatttatatacatatctgaactgtaattttatgctaaaccgaaaccagatgcagatgctccagtacatcgcgttcatcgcacccagtgtggctcctctcgacatactaggtgttccttcggacagtaaccaccgacgttaaatattgctatacgcatggagaggctgagctaaagg

SEQ ID NO: 48701 - DNA, 377 bp, Gossypium hirsutum
  Clone ID: LIB3196-055-P1-M1-D12
atgtttgccactctgtcaccatgtgtatcttcacctgcaccggccaacactcctttgtgcacctgggccagctggactggtacacttgggtccctaacgcaccctgcacgatgcggttgcccccgccgaccaccaaggatgcaacgctggagacagtgatggcaacgctgcccaacttccaccaggcttctctgcagatgtccatcacttggcagctgggcagacgccagcccattatggtggctgtgggccagcatgaggaggagtatttttcggcccctgagcctaaggctgtgctgaagaagttcagggaggagctggctgccctggataaggaaatcgagaaccggaatgcaaagctggacatgccgtacgag

SEQ ID NO: 48702 - DNA, 377 bp, Gossypium hirsutum
  Clone ID: LIB3196-055-P1-M1-D2
atggagaacgttgcgggaagtcagggaccttgaacgcagggactggctaaaaccacggcagaaaaacataaaatgtgaagatttcatggacatttattagttctccaaaattaatacttttgtaatttcttatgtctgtctttactttaatcttttaattccatcatcttctttgtaaactgaggaggatatatgtcacctcaggaccctgtgatgattgccttaactgcacaaattgtttgtggagcacgtgtgtttgaacaatatgaaatctgggcatcttggaaaaagaataagataacagcaatgttcagggaacaagggaggcaaccttgaactggccgccggtgagccggacggaacagagccatatttct

SEQ ID NO: 48703 - DNA, 386 bp, Gossypium hirsutum
  Clone ID: LIB3196-055-P1-M1-D3
gggcgcgatatccgggattgagaccatggcggcgggtgaggggctttaggcgggacctgtggttgatctgcttctgggacctcatcacatcaccactattcgcgtggtcagtgtagggaccggcacccgtagctactgccgacaggtccaaagggcacattccaataccgtcggggaaaacatattttagtttgggaacgatcctgttcagaaataccactatctccctgaagtgggatggagaaccttgagacctgtctttgaatataacctggtatctgcaaagtgctgattgggacaatgggatctacaacttcaaggcagcaaaagtcaggatgtctggggagcaacttaaggaaaaatgaggcttggctcggccagatcaa

SEQ ID NO: 48704 - DNA, 380 bp, Gossypium hirsutum
  Clone ID: LIB3196-055-P1-M1-D4
atcagtggccttggcccaggcactggcgccaacattttctgaaaccttagaagaaaatagaaaccacagaggtcagagtgagcatcttcacagacattagcaggtgcccaggggacccaccacaggctgaaatgccagcctggcacagatgtggttctcactggcaagaaccggccccggcccacgctccccactcctgcggagagctcacagccaggctaggaggcggttgtggggcccagccttcaggaataagattagtgtgtattcttttctttttttccttaaatcagtctttcttctgaaaacacctaattattcttttctttttttccttaaatcagtctttcttctgagaacacccaatgcatgtggattgg

SEQ ID NO: 48705 - DNA, 363 bp, Gossypium hirsutum
  Clone ID: LIB3196-055-P1-M1-D5
cctgaacgtgccgacattttcaacccacatgccggtcgtatttccaccctcaacaggtttaacctccccatcctccaacgacttgagctcagcgccgagaggggtgtcctctacaacagagctggtttgattccacaatggaacgtcaacgctcacaaaatactctacatgttaagaggctgtgccagagtccaagtggtgaaccacaacggcgacgcagtgttcgacgataacgtggagcaaggtcagctcctgacggtgccacagaactttgcgttcatgaaacaagcaggaaacgaaggagccgaatggatttccttcttcaccaatagcgaagccaccaacaccccaatggctggaagt

SEQ ID NO: 48706 - DNA, 193 bp, Gossypium hirsutum
  Clone ID: LIB3196-055-P1-M1-D6
tctgaacgtgcctacatttgcaggctacatgtcggacgtattttaaccctaaacagggtcaacctccctatactcaaacgactaggacttagggccgtgaggggtttactgtataacacaactggcttgaatctagaatgaatcgttaactctcaaaaaaaattcaacatgtgaagagcatggagcagaattc

SEQ ID NO: 48707 - DNA, 149 bp, Gossypium hirsutum
  Clone ID: LIB3196-055-P1-M1-D7
cgggggggcgggaggagccggcgccgaaaaaccggggggaccaacgacgccgccaaacgaaaagggacccgggggcaaaagaaccggaaaaagaacaaaaacagacaagagaaacaaccgaaggggaaagcaaaagaaaaaaaaaacaa

SEQ ID NO: 48708 - DNA, 360 bp, Gossypium hirsutum
  Clone ID: LIB3196-055-P1-M1-D8
cccacgcgtacgttgaccggcaatagcggcgattttaaataaactccacaatacttctttgcaaaacggctccgttttagggtactttatgacttttgtggcgcttccccaaaaacgccgcaaaaaaattggaatatagcggcgttttctgagaaacgccggtaccgataacgaatttgaggaaaaatctgagcaaaacagtactgttttgctgtttcattttattgctttagtggcgcattttaaaaaacgcctgaaaagaatgcattagcggcgtattcagggaaacgccgataaagatatctagttttgaggaaataattttgacaaaacgctccccgtttattgcttcattttatt

SEQ ID NO: 48709 - DNA, 300 bp, Gossypium hirsutum
  unsure (1)..(300): unsure at all n locations; Clone ID: LIB3196-055-P1-M1-D9
gtaacccctanggaaacgggaaaaccaaacccggcaatcccatccctttaaaatggttacatatttccggaaaaatgttattaatattgaaacaaaacaggaaatatttgttttttgaattaaaagtgtcgattttaactcaaaaaatgtgttataaacaaaacatttataaggcttcacctgaattctaaaaaaatttataacaacaactcgttgattttacaaaattaggtatcacagagctattacttatttaaagggctaataataaacattcttgaaataaaaaaccaaaaaggt

SEQ ID NO: 48710 - DNA, 229 bp, Gossypium hirsutum
  Clone ID: LIB3196-055-P1-M1-E1
tccatgcgttcggttacagctgacaaaagaactgtttatatctttttggctgaccagtgaaatcttcgaatttgaacgcggattgatacactatgcagatagggtactaatggatcctaatcactgattttcctaggtatgtggcatgtgcaaggtatgcgtatgtggatgtaaacgggtgctgcaacgaggacagcgcggcactggggatggatgctgaagcttctag

SEQ ID NO: 48711 - DNA, 363 bp, Gossypium hirsutum
  Clone ID: LIB3196-055-P1-M1-E10
gattttacgagcttattaattgaaagtatgacagcaagatcgctcattcccaaaccaagtaccttcgggatttagccggatatagctactcgctcagatgccttcgggacttagctcggatatagtaactcgcacaaatgccttcgggacttagcccggatatagtaactcgcacaaatgccttcgggacttagcccgaaattagtcactagcacaaatgccttcgggacttagcccagttaccatccgaatattcatgcacatatatcaataaatcatatcacatctatatttcattttcatcactagaactcaaacacaagacacttgtcaaccattcccatttttcggctcaatagccac

SEQ ID NO: 48712 - DNA, 344 bp, Gossypium hirsutum
  Clone ID: LIB3196-055-P1-M1-E12
cccacgcgtccgaaccttcttcccatttattcattacattgttcaagaaaaaagaagcaaaaaaacatggccaaagttctgttgttcattgcactatgtgtgcttccagctttggttagtgctacacgcattctgaataatcaattgttggtagaaggctatgtgtactgtgatacttgccgtgctgtttttgaaacccctaagactagaagcctagctgatgccatggttaggttgtaatgctccgacaggaagagcggccaagttgttttcaaaaaggagggattcactgacaaaaccggaaaataccatattcttgtatccgaggatcacttttatcaaat

SEQ ID NO: 48713 - DNA, 361 bp, Gossypium hirsutum
  Clone ID: LIB3196-055-P1-M1-E2
cggacgcgtgggcttaatttccatttactagcaatttcttcaagttcttttctttgtttttttaatcaatggctgaccactacctccaaaacactcaaccaatgactcaccaaatggtgaaagccgttactgccgcaacagccggtggttccctcctaattctctccggtttaatcctagctggcaccgctattgcgctcaccatagccactccactcttcgttattttcagtccagttcttgtccctgctctcattgcaacagctctactagcaacgggtttcgttgcctccggccggtttagtgttgcagctgtcacggtcctgtcctggatttacaggtatgtgacgcggaggcaccc

SEQ ID NO: 48714 - DNA, 308 bp, Gossypium hirsutum
  Clone ID: LIB3196-055-P1-M1-E3
cctacccggagcattaatgcccatagacttgccaacattacaagttgaaacgtctggctttaaaatgggtggttaaacggtaagtatatattagatgagcaaggtcctaggaatctagtgcatagccgtaccccaccatcattccgttgtaaaaaatgtaacacattcagggttactaatggttgcatccacgacatgcggccatcgttaccattagacagatgcctatacgaatcaacattatgcgacgattgccggttgacgtgcttttcatctcatttgttataagcctataggaggccattagg

SEQ ID NO: 48715 - DNA, 221 bp, Gossypium hirsutum
  Clone ID: LIB3196-055-P1-M1-E4
gagattttaaaaagtgaagcgactggcgcctgacatggattgatgaaacgggcgcgactataataatggcaacttatgctttaattcgacaaattagccggaaatttgtcaaaagggaacctgtacttaagtgctgttgttttgtccaaaacgagtccttgtttcctagtccatgccttgattgaatcacatttgcgagccagagaagctacagggctgtg

SEQ ID NO: 48716 - DNA, 423 bp, Gossypium hirsutum
  Clone ID: LIB3196-055-P1-M1-E5
ccggattacgggggcgggcgaggcggccgggccggggattccggggtgcgacctgctcggaggtatggtgctgggtgtagatgcaatgtggctctcgatagcaccttatggacagttgggccccaaaggagggatgacaatagctactgaagtcctaaagagcaagcctaactcaagccattggcatacaggcattagacagaaaattagaagttgaaatggtggtgtgcaacttgtctggaccagctttatttttttggtaagtataaaagaaaatgctgatagtgatatgcttactgctgagctaatggatcaaggcttggctgatgaatactgactgttttccttgaacatgtttggaacagtgtgtatttaccttgagcatgtttggaacggggtttgtgtaatgatgttggtcaaatg

SEQ ID NO: 48717 - DNA, 353 bp, Gossypium hirsutum
  Clone ID: LIB3196-055-P1-M1-E6
attgtgcacatttgttgacacgaatgagtttcttggttcaatggtaagactttaacttaccctttagtcctgtgtttgagtatctgactgtgcaaatagaaatttacttttgctaatttttctagtgtgctgcccatgtagtggtggtggttgggtaaaatgcaatttttaatctgataagatataaggaaattgaggctagttagttatgattgagatttctgatgttttttcttaaaatagaaaaaagaaaggtttatactatcattatcaaaagatttatattgaacttgtttggattagtttatttttccactagaaatttcccttacctttcttcgtttacccacttt

SEQ ID NO: 48718 - DNA, 362 bp, Gossypium hirsutum
  Clone ID: LIB3196-055-P1-M1-E8
gccacgcgtccgattatggggtccataccagcataaatcaacaatggcaaagctcgcaacttacttagccaccctggctctcatttagttccttgccaatgctagaaacacatatgcgacggtcgaaagcgaggaaaaccgggatagctgtgaacagcagataaggaagcaagcccacctgaagcactgccagaagaacatggaggaagagtggggtggcgaacgcagcgacaatataaccggccggtacaatgggctatggtgccagcaactagagaagatggatacgcaatgcagatgtcaaggtctaagacaagcaacgatgcaacagatgcaacagatgcaagaacaaatggggagca

SEQ ID NO: 48719 - DNA, 359 bp, Gossypium hirsutum
  Clone ID: LIB3196-055-P1-M1-F1
acggttctgcattgcatacaaagtggaaaatgcactggagctgggactcttactactggagcgctctttctagggcctaacgatattcaagcaattagctgcgattatgactccatttcagacgcctcggaattactgagattatggggatacttatgaaacccacgactctgcataaggttgaaagcaagacaatggaggtctacaagcgcaaggcgaatgactgaacttactatgagcattaaaaggagcaacagacccagagcttaataaaccaaaggatcacggctcatattgatcaagctgcgggtttacagcactttggtgctgatttcaatcaacattcaatggcccagagg

SEQ ID NO: 48720 - DNA, 272 bp, Gossypium hirsutum
  Clone ID: LIB3196-055-P1-M1-F10
accaaatagactattaatgtatcacaaaacatgtctaacccaaaagttatgacatttataatttcatatatataacaaatggccaaactgaattacctattccaacccaacctaggtatatgccatataaccaataaaagaaactatacaaacattgttaagtctcggatttttgtttggatgctaaagtcgatgcccgagacctcgatataaacctaacattcgtcaaaataaaaacaaaggaaatataagtatgagggggcaagtaatat

SEQ ID NO: 48721 - DNA, 364 bp, Gossypium hirsutum
  Clone ID: LIB3196-055-P1-M1-F11
cataatcatgccgatcaacgatcaaaacagacccatggctcaaaagctctaccactcagctccgccgtctcgccaggtggctaagttcttgaccgcctccacgttgggcgcaacgctgtttttcttgtctgggttaaccttgaccggtacggacattgccttgataatagctacgccgttgatggttatcttcagcccggttctagtcccggccgggataaccatattcttggtgacgatggggttcttgttttcggccgggtgtggggtggcgcatttaacagcgttgtcgtggatatacaattacgtgcaagggaaacacccaccaggagctgatcagctcgtttactcaggaaacaagctg

SEQ ID NO: 48722 - DNA, 414 bp, Gossypium hirsutum
  Clone ID: LIB3196-055-P1-M1-F12
cgctggagcgggttggtgccccgccgcaatttccgggattgggcctactggagcagcaaaacatggttctggacaccaaatggaccctgctgcatgagcagggctccaagaccgtgaggcagaacctggagccattgtttgagcagtacatcaacaacctcaggaggcagctggacagtttcgttggggaacggtgccgcctggactcagagctgagaaacatgcaggacctggtggaggacttcaagaacacgtttgaggatgaaatcaacaagcgcaccactgccgagaatgagtttgtgatgctgaagaaggatgtatatgctgcctacatgaacaaggtggagctagaggccagggtcgctgcgctgatggatgagattaacttcatgaagatgttctttgatgcggagc

SEQ ID NO: 48723 - DNA, 238 bp, Gossypium hirsutum
  Clone ID: LIB3196-055-P1-M1-F2
cccgcgcgtaatcccacgtgttaccagcgcggcaagtgcgcccccgtgttcgaagagaaaattcttattgaaaaagccaccaaaagtctcgaaaacactttctggggtcctcgcagagtacagggagggcaagaggattacgcttccctgcaccataaagatcattgactccatcctcttaggaaagctccttgacgcctacttccaccaaaaccgctgggttggggccgcagatccc

SEQ ID NO: 48724 - DNA, 423 bp, Gossypium hirsutum
  Clone ID: LIB3196-055-P1-M1-F3
caagttggaacgaagaagcgcgcgggtaccccgccgcaatttccgggatggggcccacgcgtcgggcttggatccttatccgggacaagggttcttggttcttcagaaacaaactacctggcttgcaccctttgccctgacatgccgagcctgttacgccaaggatcgagaacgtctagaactgtcaggatgggcaacacctgcagcctgacatgtccaatgctgacacgctggaagctgggaggcggcacgcataacgggtggcagccctaggaaatgacccgctgtcccggctggtgatgctaaatgtgactcccaatcagcaccagtactccaacatgcacttggacatccacctgcaccagtaagatgctatacatgcaaactctgactcagtgcaaattatcatccacctcatgggct

SEQ ID NO: 48725 - DNA, 385 bp, Gossypium hirsutum
  Clone ID: LIB3196-055-P1-M1-F4
attcggcgcccacgtcggatgtgggacaggcttgggggaaagagcttgtcctatctcaggaacaaactaacaggctgtgggcagagggtctgaaaggtggggctttggggtagtgcccaagcctggccatattgccaggagtggtgacaagtgagaaatgcatcttccatcaaacaaacacgtggtgcatggccactgcctgacagccagatggcctgtagaaagagctaccagggctcccagacctgtggaacaaaaaggatggggaaaaggcacaggggcactgagtgtccctttaaaaactaacacactgaatattctgtgcgatccagaacagtgtggcagctttcacagcacaggaccattcatcaggggcctaaacgtt

SEQ ID NO: 48726 - DNA, 329 bp, Gossypium hirsutum
  Clone ID: LIB3196-055-P1-M1-F5
atgagccacagttttggtggaaagggctccgactattaaagatacaagaaaactggctccaaacggaggaaataaacggggcggcaagaagcctgcgccgaagactaaagccatagctgggaatgcccacacagagaaaaagcctaaggcagcgaaaaagctccccaaggaaggcgcaccggctgccggagacatgaacaagaaaagaggttacaagagcgtcgagacctacaagacatacatgtataaggtactggagcaggtgcaccctgacatcgtgatctatagcacagatttggggatcatgaacagtttcaacagtgattttt

SEQ ID NO: 48727 - DNA, 345 bp, Gossypium hirsutum
  Clone ID: LIB3196-055-P1-M1-F6
aacaattgcagtgcatgtggtaccaatctttaggcaggtgtctcagatagtggatcatctacaaagcatgtccactacatctgcctcagaatccgccagcatcagggttcttaagtttgtcataaacagtgtgttaagcggtaaatgattttgttcaaatttgctagaatatcatcctttttttatttgtcatttttgtttttaaatatagaaatttaggtacttgcagcggaaagacaaatgggggattatttcgtatattcagttgtatgttccattttgtgtgaaatagttgagagcgtatttacttctcaaaatgacttatcgtcaatgggtagtcaaaaa

SEQ ID NO: 48728 - DNA, 159 bp, Gossypium hirsutum
  Clone ID: LIB3196-055-P1-M1-F7
gccccctatcaatttcattccagggggtaccaagacttgggcatgggccttaaatagggggtcatctttttaggggggttactacattcaagcgaagaagccgcccgcataagggttcttaagcctgcccgagatagccaggaaaaacggggaacttct

SEQ ID NO: 48729 - DNA, 361 bp, Gossypium hirsutum
  Clone ID: LIB3196-055-P1-M1-F8
aaagtatagggaaaagaaaatgcagagaaaaatgaaccataagaacgttcacataacacatatctggagtaaatatacaatcccatgaataaggagtcctataagaatcaggaaaaaataaaataattagattggtagaaagtgaaaaaaagaacaggctgggtacaggggcataatgcctataataccagcaccttgggaggccaaggaaggcagattgcttgaacccaggagtgagagaccggcctaagcaacatggtgagataccatctctattttaaaaaataaaaagaactctggtaaagggcacctgctataagttaagccccactataacatgaatcaaaaggacctggaggat

SEQ ID NO: 48730 - DNA, 307 bp, Gossypium hirsutum
  Clone ID: LIB3196-055-P1-M1-F9
cggacccgtgggagccagggctgtaatgtttcaaaatacaatttgtctgatactcacagcaaaagttttccacttgaacaatcatcattgcaaacaattaaaattatcggaaagaaaacataaattgattccataattctgatattcactaaaccctcatcattcggtcaaaagcaggatcgacccaacacttctttttccaatcgaaaggtcattaatgtattccccagacaaccaatctaggccttatcatcacggtctgacacggaaatatttatttttcatggattgcaacatagcccagggc

SEQ ID NO: 48731 - DNA, 374 bp, Gossypium hirsutum
  Clone ID: LIB3196-055-P1-M1-G1
gtcgcgaagattgcggagtgaagcatgtcctgacagatctccactgcatacacggtggaaaagcttatgtgaatggaacccagaagcttcgagtgggctttctgaagcccaagtttaaagatggtggtagaggggccaatgactccacttcatccatgcccgagatgatgaaatcacagtggatccggacgaaacgcacccatgtgcccaagggtggaatcaaggccaatgccaactacatcgccatggattatgactacgccctcctggaacttaaaacgccccacaagagaaaattcataaagagcggggtgagcaatcactctcagagagttactgggggctaaatccaactgtcttgttgttgttatgac

SEQ ID NO: 48732 - DNA, 270 bp, Gossypium hirsutum
  Clone ID: LIB3196-055-P1-M1-G10
cggacgcgtgggattagctatcatgtttgatgcttattttatgtatatatgcatgtgtgaaaatttcatatttgaattttgttaattctaggtgaattttagtaaataggacttatgtgagaaaatttagaaatgtgctaggcaaatgtaaagtggcctattaatgtatgttataaaaatgatgggtttgcatgtcaaattacccaaaatttgagctagtggctggccatgctatgggtggaaacatgttgtgttagtgtgttatgttag

SEQ ID NO: 48733 - DNA, 418 bp, Gossypium hirsutum
  Clone ID: LIB3196-055-P1-M1-G11
gaagcgggttggtgccgggccgggatttccgggatcggcacgagacgtctgggttcccttccgcggcgaccagggcccgagccgtgagtagcagttgttgttacccgcccagaaactagacacaatagtgcgacgaagacgagaccaccgccctcgtgtgcgacaatggctccggcctggtgaaagccggcttcgccggggatgacgcccctagggccgtgtttccgtccatcgtgggccgcccccgacaccagggcgtaatggtcggtatgggtcataaagatgcttacgtgggcgacatggctcatagcaagagaggtatcctgaccctgaagtaccctatcgagcatggcatcattaccaactgggacgacatggagaagatctggcaccacaccttatacaacgagctccgcgt

SEQ ID NO: 48734 - DNA, 149 bp, Gossypium hirsutum
  Clone ID: LIB3196-055-P1-M1-G12
tggtatttgtcaccaagctggttcagatagtttgcttacttgttgtacattcatgaaactgaaagaaaatttctttagtggttcggccgagaaatatgctggtgtgttatatggtcttggtgttgagaatggatagaatactctctaat

SEQ ID NO: 48735 - DNA, 361 bp, Gossypium hirsutum
  Clone ID: LIB3196-055-P1-M1-G2
gttgaaaggagaagtggacaatacaagacagtgagagcccagttatcaaccggtgacctatttgtagtcccagcaggccatccagtcacattcgttgcctcccaaaacgaggacctaggattgctcgggttcggactctacaacggccaagacaacaagaggatcttcgtggctgggaaaaccaacaatgtgagacaatgggatcgccaggccaaggagctggcgtttggggtggagtcaaggttggtggatgaggtattcaacaacaacccggcaagaatcttacttcgtgtctggacagagtcggcgtggatttgatgagaggaggggaagtaataaccccttatcgccgttcctggac

SEQ ID NO: 48736 - DNA, 109 bp, Gossypium hirsutum
  Clone ID: LIB3196-055-P1-M1-G3
gttgagtgtggtgccggcaggggcggtactttcagatccaatagcttatatttaagttgatgcggttaaaaagctcgtcgttgaactcaagggtgggtcggacggtccg

SEQ ID NO: 48737 - DNA, 409 bp, Gossypium hirsutum
  Clone ID: LIB3196-055-P1-M1-G4
cgcctggggtccgctccgcaatttccgggatccggaccggacttccgagacatcaagaaccggacttgagcaggtccttccaatatagctgccaaagctccgactgaccagggacctttccagagctcaaggatttctggacctttctaccaattgtggaccatgggagggcccagggaggactttcatactgctgaatgttttccagagcatatattacaatctttcaaagtcgtacactagactaaagtggtttttcgagcgatagggcatcaggtggtgggaacagcaggaaaaggcattccagtctgccccactgggtccggcagccctcccgggaggggcccacatccttctactccagtccttgtccaggggtagaggcagaccagcagctggacttgatccc

SEQ ID NO: 48738 - DNA, 344 bp, Gossypium hirsutum
  Clone ID: LIB3196-055-P1-M1-G6
cttaatcagcttgatggattggggcagtttgggaaggttaaaatgatcatggctacaaaccgccctgatgatcttgaccctggactggttcgtcctggacggctggacagaaagatagagatcccattgccaaatgagcagtcatgaatggaaatcctcaagattcatgctgctggcatagccaagcatggtgaaattgactacgaggctgcagttaaacttgctgagggctttaatgatgctgatctactaaatgtttgcacggaaagctgtaatgtcagcaattcgttcagaacgtgataatgtcatacacgaagattatatgaaggcagtgggaaaattga

SEQ ID NO: 48739 - DNA, 354 bp, Gossypium hirsutum
  Clone ID: LIB3196-055-P1-M1-G7
cggacgcgtgggtttgtttgtaaaaagtacttacccaaccaatacaatcgaatcccaagtgaaaaaaaatggaaaaaatactaatattttaaaaagttggaatttgggatgatataataagtttgttgtcatctgcaacagctgagtttggaccttcaatgggtataaaaggtggaaatgcagcaaggatcccagaacatacatgtcataaagttatagagacaaacacatgtgagttgcagaaatgcatccacgaatgttccaaggaacctgctggtgtcggggactgcacagattacaatgtttgttattgcactttttattgtaaggatccccctctgtgattcattcata

SEQ ID NO: 48740 - DNA, 270 bp, Gossypium hirsutum
  Clone ID: LIB3196-055-P1-M1-G8
gcagctaaagacggaaaacatgacaggagttaatgataaggcacgccgtttttgaaaagctcgagaaaaccaaggtggaatgtggcaaatactttttctttgttagccgaaacaatcaacaacatatggtgaatctcttagtaaaaagatatattggaaaaaagacagtacttttataatttctttaacttttttttccattttttaagggtaaattggtctttgtggcagtagttagctaataaaattgacattttgtaaaaaaaaaca

SEQ ID NO: 48741 - DNA, 313 bp, Gossypium hirsutum
  Clone ID: LIB3196-055-P1-M1-G9
agagccatatggcaagggggtaagccgggctggccagaactattccctatgttgggaagctgaagaaggccaatgtggtcagaggccattacttggacctggtgcggcaggacatactcctgcacctggagaagcaattacttgaacaagaaactgcaacgctgacagagcttttataacctccttaactccaggttccaccatgtcagcatgtcatgaagctactgccggtggaataccagcttaatcagccgcagggggggaactaccctgttgagagtggcccctttcatgaggaccgaggctctcatac

SEQ ID NO: 48742 - DNA, 382 bp, Gossypium hirsutum
  Clone ID: LIB3196-055-P1-M1-H1
atgacgccttctagctgacccccaagcagcccagcgaaactcataggagcgcgcgcagcgcgatggacggtcgggtgcaactgatgaaggccctcctggcccggcccctccggcccgcggcgcgtcgctggaggaatccgattccctttcccgagacgtttgatggcgataccgaccggctcccggagttcatcgtgcagacgggctgctacatgttcgtggacgagaacacgttctacaacgacgccctgaaggtgacgttcctcatcacccgcctcacggtgcccgccctgcagtgggtgatcccctacatcaagaaggagagccccctactcagtgattaccggggcttcctggccgagatgaaccgggtctttggatg

SEQ ID NO: 48743 - DNA, 368 bp, Gossypium hirsutum
  Clone ID: LIB3196-055-P1-M1-H10
taaactttttgaaaggctctccttaaaaaaaggtgcctttggtttggtctttggattgataaaagaagtcttcttctttttttttttattctctaaacaaagctgtctcaagtaaaatagtaatttgttcatcatgctttgagacctaaaacacatacatgatgattaatgtagggaaagatgggtttaagatacctcattttatattcttaaatgataatcaaggctttaactaaagatgattacaggtatatcacttcttttctcttctaactttataaaaataattatttcattttcctatttatttttttcgtaactttcgttctcaatcaccattaaatagatagaaaagttaatgtttgtta

SEQ ID NO: 48744 - DNA, 91 bp, Gossypium hirsutum
  Clone ID: LIB3196-055-P1-M1-H11
atcacagttccaaagggtgtgctctcaaaacattgcccatggttatttcttccctttcactaaacaaggacctaaacctcgttccttattg

SEQ ID NO: 48745 - DNA, 283 bp, Gossypium hirsutum
  Clone ID: LIB3196-055-P1-M1-H12
cggacgcgtgggcggacgcgtgggcgtcaagattgacaaatgatcgcacgaatgctacgagctccgtttctctcactttctaaatttcaggtacctcttgcttcacttccagtccttcttggatctcatggacgttgcggtacacaagtgattgagaataattgtgatcctactggaatttcatcaaataagatctcggtttatggattcagaatgtttttcaccgccactgctaaagatttgtcggctaagaagtgcgtgccatgcaacacgaaggatctac

SEQ ID NO: 48746 - DNA, 400 bp, Gossypium hirsutum
  Clone ID: LIB3196-055-P1-M1-H2
gtccgcaatttccgggatgacacctactcgctgacccccacgtaggccatcctgggtcatatgagcgcgcgcagagcgactcacgcgcgggtacaactgttaaaggccctcttggcccgtcccctctgacccgcagcgcgtccctggaggaatacaactacctttcctgcgacattggttggcgaaaccgaccggttaccagagttcattgtgcagacggactgttacatgttcaagaactggaacactttctccaacgacgcccttaaacttaatttcttcatgacgcgattcacggtgaacaccgtgaagtggttgcccccctagatcaagaatgggggccgcctactcattgattaccgtggcttcctggccgggatgaaccgggtttttgtattgt

SEQ ID NO: 48747 - DNA, 366 bp, Gossypium hirsutum
  Clone ID: LIB3196-055-P1-M1-H3
gtatactcaaatgtatgggatagactatcttgagacatttgcccctgttgcaaagatgaacactgtaagagtgttgttgtcactagctgccaaccgaggctggaaattacagcaatttaacataaaaaatgcctttttacacggtgaccttgaggaggaagtctatatggatgttcctccaggattcagtccaaatacaggacaggcagtttgcagactgaaaaaggctttatatggactaaaacagtccccgagggcttggtttggaagatttaccaaagtgatgctcaagttggggtataaatagagtcaaggagatcatactctgttcgtaaaacattcatcttcagggggagtgactgcttt

SEQ ID NO: 48748 - DNA, 238 bp, Gossypium hirsutum
  Clone ID: LIB3196-055-P1-M1-H4
ccataatgaaatacaccggggggcttgactgaactcagtgggagctagattaacaggtaagactgtatgagagagactatgacaaggtgcaagcgattgctgatagtttgaaaacatgaacagatccgttgacatcgtacacagactcgaattgaagagagattatgtgtctgatagggaatgatgggtttaagatacgctatttgtggttgacaaactttaaatagggcttaaagga

SEQ ID NO: 48749 - DNA, 274 bp, Gossypium hirsutum
  Clone ID: LIB3196-055-P1-M1-H5
tgccacacgaactgctaggtggtgacggtaaatgatctatgcactgtcttttaatgatttgcaactcatcaagaacacttaatccaagttttaaccatgtccagaatctgcctttgaaggacatgtaatatgtgaatgctctccttttacaggatctatctatgttcttgccacatcaatatacatattgctttaacacaactcgtcaaagttgcccacatttaactcagacttgggtgcaattattttaccttttgtttatgttttaaatatc

SEQ ID NO: 48750 - DNA, 57 bp, Gossypium hirsutum
  Clone ID: LIB3196-055-P1-M1-H7
aaaatatgatcatgatgtggtacactatggcaaatttaattgatactcccttgcatt

SEQ ID NO: 48751 - DNA, 230 bp, Gossypium hirsutum
  unsure (1)..(230): unsure at all n locations; Clone ID: LIB3196-055-P1-M1-H8
accacgcgaacgcgagggggtcgcccacggcgcaagaaccgaacaaagcngaagaagggaagccaaggaaaagcaaaaaacacggccggaaacaggaaacgggagaccggccaggcacgcgaacgccnaggacgccgcccacaaggcaacaacaaagaccaggagcaacgaccaaggcaacggacccagaggaacgaacaagaaaaaacaccacggggggacaaggaggc

SEQ ID NO: 48752 - DNA, 329 bp, Gossypium hirsutum
  Clone ID: LIB3196-055-P1-M1-H9
gcgatggtaaccactggtgcgctgactaccgacccatttaagtttttatttctaaatggtttgtttgtaatcactaaccgtttaatggtagcgatatctgtgtgtttaattaataactgccgtgcttcttgcttttgcccaaagtaagaagctgtatctctaatgttgatcagaactctagtactaggtgattgtgaagtagtaatcatgatggtaagcataacaatgtctaaactcgagactacccccatgtggggtttagttttagaaaaaagttgtactgtttatctgcgaactaatatatgtattactgattatctcattttcag

SEQ ID NO: 48753 - DNA, 378 bp, Gossypium hirsutum
  Clone ID: LIB3196-056-P1-M1-A1
ctcttatgcctcctattcatggaggtgttgaagatattcccaaacctccggtggtcaatagacctccggagaagagacagcgagtcccatctgcctacaaccgcttcatcaaggacgaaatccaacgcatcaaagctggaaaccctgatatcagtcatagagaggccttcagtgccgctgccaagaattgggcccacttccctctcatacatttcggacttatgcctgatcaacccgtgaagaaaactaacgtgcaccaacaggaaggagaggagatggtgatgaaagatgggttctttgctccaaacaacgtgggtgttaccccttaccaaacagtccaaactactgctagggtttctgtgccttctctcttttact

SEQ ID NO: 48754 - DNA, 339 bp, Gossypium hirsutum
  Clone ID: LIB3196-056-P1-M1-A12
atgccaggtccccgaagccgactcagtcagcttcctgcaggagctgctggcactaaggctggccctggaggaggggtgtggccctggccctggacccccgagggagctcagcttcaccaaatcttcccaagctgtccgcgcagtgagagacgtgctggccgtggcctgcgccaaccagtgggagcagctgagggggccgggtggcaacgaggacgggccacagaagctggattcggaagctgatgctgagccccaggaccccgatagcacgaacctcttagagagtgaagctcccagggactatttcctgaagtttgcctacatcgtggatttggacag

SEQ ID NO: 48755 - DNA, 236 bp, Gossypium hirsutum
  Clone ID: LIB3196-056-P1-M1-A2
gaaagacattagtggtaaccctagagctcttagaaggttgagaacttcttgcgagagggcaaaaagaactttttcgtccaccgctcaaaccaccattgaaatagattcgttatacgaaggtattgactattactcaaccataacccgagccagataagaggagctcaacatggatttattcaaaaagtgtatgtaaccagttgtaaaatgcttaagggatgccaatatggacaaga

SEQ ID NO: 48756 - DNA, 312 bp, Gossypium hirsutum
  Clone ID: LIB3196-056-P1-M1-A3
cggacgcgtgggcggacgcgtgggacttaagtgattttagtctaaaatttgcatgttcatcagcttttttgggagttaatcagactcatgaaactttgggccaatggtgtgttgtgttcatgtcattcggggtgaaagagatggatttaggggaagatgttgatgctgttgatggtggtttgctgcatgggcgaagagcaataactagttttcattcaaccctggattgttttatccttaaataagtcactgcgcctggcatgtaagttgcctgctttacatcatggccaggaatggaacgcggcatatggt

SEQ ID NO: 48757 - DNA, 322 bp, Gossypium hirsutum
  Clone ID: LIB3196-056-P1-M1-A4
tatcgcaagagggtcttcctgagcgccgagtgagcccactcaccactcagtcaggacgtggacttggaactcaggatggggccgtcacagacaggcctgccgagctgggatgtggaaccgcggtgggtggagagctctgaataaaccgtctgtgtcatggccgcgcctgcctctgagtggtcaggccacgtctgcagggcaaagcccatcggggtcctcttgggtggggacctgatggctgtgggatgtgcttggcctggagtcagtgtgggggtaacatagtcagatatttgatgctggcattccctctagagttaggggc

SEQ ID NO: 48758 - DNA, 128 bp, Gossypium hirsutum
  Clone ID: LIB3196-056-P1-M1-A5
aaaaaaaaaaaaaaaaaaaaaataaaaaaaaaaaaaaaaaaaaaaaaaaataatataaaaaaaaaaaatataaaaaggggtctgttgataataaaagaaaccaaaataacgttaaatataaatatata

SEQ ID NO: 48759 - DNA, 354 bp, Gossypium hirsutum
  Clone ID: LIB3196-056-P1-M1-A6
aacaaaaacacctttttcttcactccttcacagtccgagaggagggccgatgcttaaactccagccgatgccaatgcaatcaaaatcagggggatctttgtagggtaacgtaagtaggaagtaataaaaagagttgcagagctatgtccgccatggattttgttgttgatcgttgaggtactgaaagattagggtttagaggatgaataataaaaagaaagggtcttacaaggcggccctttcatttcatgtaatcggctgaaatgttacaacttcaatttatgtaactttctattaaaaaaaaaaaaattaataattatattaatttaattaactaattatcttttataatta

SEQ ID NO: 48760 - DNA, 198 bp, Gossypium hirsutum
  Clone ID: LIB3196-056-P1-M1-A7
caatgatgcctcctattaatggaggtgttgaagatattcccaaacttctggtggtaaatagaactgaacagaatagacaacgagtcaaatcagcatacaactagattattaaggccaaagtacaacgtattaatgaagcaaaacccgatataaattttagaaggtcatcaagtatctattcaaatagtggttccaact

SEQ ID NO: 48761 - DNA, 311 bp, Gossypium hirsutum
  Clone ID: LIB3196-056-P1-M1-A9
cggacgcgtgggcggacgcgtgggacttaagtgattttagtctaaaatttgcatgtccatcagcttttttgggagttaatcagactcatgaaactttgggccaatggtgtgttgtgttcatgtcattcggggtgaaagagatggatttaggggaagatgttgatgctgttgatggcggttggttgtatgggccaagagcgataactagttttcattcattccgggtttgttttatccttaaataagtcactgcgcctggcattgaaaaattctcttttacataattttctggaatggatcaaggcatattg

SEQ ID NO: 48762 - DNA, 162 bp, Gossypium hirsutum
  Clone ID: LIB3196-056-P1-M1-B1
cggacgcgtgggcggacgcgtgggacttaagtgattttagtctaaaatttgcatgttcatcagcttatttggcagttaataagactcatgaaactttgggccattggtgtgttgtgttcacgttattcggggtgaaagagaaggatttaggccaaggtattg

SEQ ID NO: 48763 - DNA, 337 bp, Gossypium hirsutum
  Clone ID: LIB3196-056-P1-M1-B10
tattgcttggaaaagacaagctttccagacaatgtttgcagagaaagttacctggaagcgcggacgttattcatacttataaccttctgccacgtatgcggcatggtgaacacagacaaactctctgcaaataactttccactgccatagctctaggctgtccactcttgaggagctcccataacccaaaaaggcaagatctgcccaatgtatcagagcatccttgagcacctatagagaaacttggcttccaaatgagcaatggctatgagggcaaacagagtgctagaattcttccatttgaatccgcttgaactaatcaaggcctctggagcat

SEQ ID NO: 48764 - DNA, 285 bp, Gossypium hirsutum
  Clone ID: LIB3196-056-P1-M1-B11
cacacaatggaaacacctacggagggtggacactatgtgcaacatcatcaaactatgtaggaaaaaagttacacaacaaacggaaagcaaataatgttgtaaaataaaaaaataaaaccactaacctgtaagtagtggagaaccgtatcaggagtaaacactaacctgtaaagagttggctcaatactggcttttattaactctgatgctggctatgccatcgtatagatgaaagaattaaaataatttgcatctgagattttgttaacagaaaataataatttg

SEQ ID NO: 48765 - DNA, 351 bp, Gossypium hirsutum
  Clone ID: LIB3196-056-P1-M1-B12
aagcaacatgttttcttcaaggatattaattggagcacacttgcaagacaaaaggctatgttcataccatcaactgaagcacatgacactagttactttatgagccgatatatatggaatgcagaagatgaacaagttcgtggaagtagcgacttcgatgacttgactgacacctgcagcagtgggtcactcagcaacgtgcaagatgaagatggggacgaatgtggcagtttgacggatttcagtgctcctgcccttgcagtgaagtactcatttagtaatttctcatataagaatttatctcagttggctttcatcaattatgatctggttgtaaagaacgcctaggaa

SEQ ID NO: 48766 - DNA, 373 bp, Gossypium hirsutum
  Clone ID: LIB3196-056-P1-M1-B2
ataaactataagaacctgccagaaaaagggaaaaagaagaattagtaaaagaaattagaataaaatttaaattgaagtaaaagtaaatggctaaagtattaaaaatggagtgttcctaatatcttagttccccggaaacggcgccaaaaacttgatacgtgatcttagtgataggttttaaatattaataatgaatcgctcttgaaactaactattatcacgatgaaggtatgtgtacctaatgagcagtagtttatgtttagcatgaccggattgtcgaacctaaaggacctaatagttctaggtattgactgttcttttctttatctagtcctaagaagatatggggtttgtttttaactaactaattaac

SEQ ID NO: 48767 - DNA, 282 bp, Gossypium hirsutum
  Clone ID: LIB3196-056-P1-M1-B3
attgacaatgcccttgctttgtcttcagactagcatgggattctgacaagtaagaaattaggatccacaggagacgatgctctgaagcaccatttttgagccttcctatgagccaggagtggcccaggtgtctgagatctgatctatgcccaatcctttcacgactgtactgattggatggcatatgtcatacccttgtgctttaaaagttcattagagttttttctaaagtaaatggtccagatatttttctttttaggttaggcagtggtgcatttttgt

SEQ ID NO: 48768 - DNA, 243 bp, Gossypium hirsutum
  Clone ID: LIB3196-056-P1-M1-B4
cgcacgcgtcagctgactcgaggaagaaccgttcgaagcgcgtcctcttcatcgttgcaaactgacgtattgttaagaataggaagcatccttgctgtatggggaaactccggatgcattcaccaccacaggatcctctatgacagatattgccctaaagtatttcggtaccctactgtatgaggttcttccacaagctccgtatcatgttttactgccgaattgacaacatcgtcacgcttt

SEQ ID NO: 48769 - DNA, 135 bp, Gossypium hirsutum
  Clone ID: LIB3196-056-P1-M1-B5
tgcagcctttcttaaccttgggaaagtaacatttggaaagtcaatcctataaatgctcaacatatacatatatatatatatcatcaccatgatcgtcatcggcatcgacatcatatatattggggatctaacaga

SEQ ID NO: 48770 - DNA, 316 bp, Gossypium hirsutum
  Clone ID: LIB3196-056-P1-M1-B6
cccacgcgtccggtggatgagatattcaacaacaacccacaagagtcttacttcgtgtttcgacagaggcagcgtgcatctgaataaagagttagaggcaataataaccacatagtctcgtgtttacggactaatgtgaaattttctagttttaagcaggcttgtaatgaaataaaaatggtgacctatgtaaaggaggagacccttgttttgtagtgcaataacttgtatgaactttttgagggccttttttgtctttctaatgtaagggataaatcgttaagttcttaagtaaaaaaaaaaaaaaagggcggcc

SEQ ID NO: 48771 - DNA, 288 bp, Gossypium hirsutum
  Clone ID: LIB3196-056-P1-M1-B7
cggacgcgtgggcggacgcgtggggtagatatggcgattaacccttctttgctctttctttcccttctttttctcttcaatggctgcctagctcgccagaccttttcgtcacagcagtcccaaaatgagtgtcaaatcaataggctccgcgcctctgcaccctagacccgaattcgttccgaagccggcaccaccgagtggtggaaccccaactgtcaacagctcaagtgtgctgggtgtatctgtaatgaggcggactattggaacctaatggcctttgttttgcct

SEQ ID NO: 48772 - DNA, 124 bp, Gossypium hirsutum
  Clone ID: LIB3196-056-P1-M1-B8
cgactgacaagcgggaacgctggtacgcccccaggtcccaatcccagaatcgccccacgcgtccgtccacgcgtccgcttttgcgtgcttcattctcatttagccccttacattagcatcaaat

SEQ ID NO: 48773 - DNA, 388 bp, Gossypium hirsutum
  Clone ID: LIB3196-056-P1-M1-B9
atagacaatgcccttgctttgtcttcagactagcatgggattctgacaagtaagaaattaggatccacaggagacgatgctctgaagcaccatttctgagccttcctatgagccaggagtggcccaggtgtctgagatctgtcctctgcccaatccttccccgactgtacagattggatggcatatgacgtccccttgtgctttcaaagtccattagtttttgttctaagtaaaatgtccagaaatttctctcctagggtaggcagtggtgcacattgtcaggggcaagacacttttgggcaaagtctgtgtggggcccacagcaggttcctcccaacccttgccatttgtttaaaaagttcaaccactggggtttgaaaatcttacc

SEQ ID NO: 48774 - DNA, 264 bp, Gossypium hirsutum
  Clone ID: LIB3196-056-P1-M1-C1
atagacaatgcccttgctttgacttcagactagcatggggttctgacaagtaagaaattaggatccacaggagacgatgctctgaagcaccatttttgagccttcctatgagtcaggagtggcccaggtgtctgagaactgtcctctgtccaatcctttcctgactgtacagaatggatggtatatgacgtacccttgtgcttataaagtccattaatttttgttctaaggaaaatgttcagaaatatctctcctatggttggc

SEQ ID NO: 48775 - DNA, 281 bp, Gossypium hirsutum
  Clone ID: LIB3196-056-P1-M1-C10
aacacgtaaatatggcgattaaccctacttagctctttctttcccttattttcctctacaatggctgcctagctcgccagaccttttcgtcacagcagtcccaaaatgagtgtcaaatcaataggctccgcagcctttgcaccccagacccgaattcgctccgaagccggcaccaccgagtggtggaaccccaactgtcaacagctcaggtgtgctggtgtatctgtaatgaggcaaactattgaacctaatggccttgttttgccttccttcaccaatgc

SEQ ID NO: 48776 - DNA, 361 bp, Gossypium hirsutum
  Clone ID: LIB3196-056-P1-M1-C12
atcatcccagaaaagaaccgcagggagatatcaaagtatctctttcaagagggtgtttgctacgccaaaaaagattacaacttggcaaaacacccagaaatcgatgttccaaatcttcaagtaataaagctgatgcaaagcttcaaatccaaggaatacgttcgtgaaacttttgcttggatgcattattactggtaccttaccaacgatggcattgaatttttaaggacataccttaatctcccctctgagattgttcctgctactttgaagaagcaaactaggcccggtggtggtcgtcccatgggtccttctgatagccgcccacgtggtccgccacgctttggcgacggtgagaggc

SEQ ID NO: 48777 - DNA, 423 bp, Gossypium hirsutum
  Clone ID: LIB3196-056-P1-M1-C2
acgtaaaagcaggctggcaccgtgccggagttcccgggatgcccgaccgtgaggagagaattttcagcgctgtggtctggcgctgaggaggcggcggtggctcccggggcgtttgagcgggctcacccgagcccgcgggccaacgcggatccaggcccgaccggcgggaccgccccggactccccgcgggccttcctagccgccatggaggacggcgtctatgaacccccagacctgactccggaggagcggatggagctgtagaacattcggcggcggaagcaggtgctgctggcggagattaagcgcctgcggtaggagttcagtgaacccatgagcgagtaagaccttgcagcggaaccggtagttggcatagggctggaagaaggttaacatggtctccacgaagggtgatctgttttt

SEQ ID NO: 48778 - DNA, 367 bp, Gossypium hirsutum
  Clone ID: LIB3196-056-P1-M1-C3
caaaatcatgaggagcatttgtgttgtgcttgttatctctttgcctttccttctcggcattgcccagggtttcgatttccacgacaatgatttagcgtcggaggatagtttgtgggatctatacgagcgctggcggagccaccacacggtttccaggagtctcgacgagaaacatcggaggttcaatgtgttcaagcagaatgttttgcatgttcacaacaccaacaacaaggacaaaccttacaagttgaagatcaacaagtttgctgatatgaccaaccacgaatttaggaatgcttacgctagttccaagattaaacatcataagatgttccaaggacagtcccgtggcgccgggagtttcatg

SEQ ID NO: 48779 - DNA, 324 bp, Gossypium hirsutum
  Clone ID: LIB3196-056-P1-M1-C5
caaagaaccatgcatcggacaggacatcaaattcatcaactccctgtgatatagctgaaaggtccaatttcaacatttgcgagacagaatgggaaaattgtggtgagactctttctcctatgtgtcattcggcaacttctttcttcagtgaaagtatcagtgcaagtggcagtggcagttcatttggatgaacaaccacctgctgaaacctttactgagccttcatacaaaatcagaatcatcggattcatgttttgaccccctgggtggaaaaagaggctcctcatttgttcagacggtagatgccctgatattttgcttgct

SEQ ID NO: 48780 - DNA, 299 bp, Gossypium hirsutum
  Clone ID: LIB3196-056-P1-M1-C7
atgtaaagattcaaagtttgtctttattactgtatgtaaattagacattaatccactaaactggtcttcttcaagagagctaagtatacactgtctggtgaaacttggattctttcctgtaaaagtgggaccaagcaatgatgatcttctgtggtgcttaaggaaacttactagagctccactaacagtctcataaggaggcagccatcataaccattgaatagcatgcaagggtaagaatgagtttttaactgctttgtaagaaaatggaaaaggtcaataaagatatatttctttag

SEQ ID NO: 48781 - DNA, 361 bp, Gossypium hirsutum
  Clone ID: LIB3196-056-P1-M1-C8
atgtcaaagcaaaagcaacagctcaagcagcctccttggagaaaatctgaaaattcaacttgttcaagagaaggtcttgtacgtgcctaagttccagagcctcctgacgtgagcatggctgagagtgaggacccctctctgaggatcgttctggtagggaaaactggaagtgggaaaagtggaacagcgaacaccatccttggaaagaaaatctttgagtctagaattgctgcccaagctgttaccaagacctgtcaaaaagcatcccgggaatggcaggggagacacctttttgttgttgacactccagggctctttgacaccaaggagaggctggaaaccacctgtagggaaatcagcc

SEQ ID NO: 48782 - DNA, 284 bp, Gossypium hirsutum
  Clone ID: LIB3196-056-P1-M1-C9
atgttaaacattgcagatggtggttttactgagttgcactccctttggcagaatgaagagcggtcagccacagttaccaagaagactaacgagatctggcatcgacggcatgactactggctgctagccgccatcataaaccatggctatgcccgggggcaagacatccagaatgacccacgctatgccatcctcaatgagcctttcaagggtgaaatgaaccgcggcattttcttagagatcaatgataaatttctagctcaaaggtttaagctcttagaaca

SEQ ID NO: 48783 - DNA, 191 bp, Gossypium hirsutum
  Clone ID: LIB3196-056-P1-M1-D1
cggacgcgtgggcccaaatgggaaccagtggctcgtagtagtgtgagtagcaggtctcacagtacatccaaagccagggctgggttgtaaatccgagcctacccttgtattgagagcgctaggcttacatgaggagggccatccgaactgtgatatttattgccagcttaggcctgaaagccaagtgggca

SEQ ID NO: 48784 - DNA, 360 bp, Gossypium hirsutum
  Clone ID: LIB3196-056-P1-M1-D2
taaaaaaaaaaaaaaaaaaaaaaaaaaaaaaaaaaaaaaataaaaataataaaaaataaaaaaataaataaaatataaatattaaaataaaattaataatttaataatacgtaaaatatatattaaatatttataattgtgtggcttttttatgtgttaaatatttatttttttttgatttcaaattttttatttttttatttgggtctttaaaatttatttttttgccgtttttttttaaatgtattatttgtaaaaattttgtgtttacctaattttatttttttgtaaaaatttccattttttctatttggttttttttttatttgtttcctccttttattttttttcttaattttt

SEQ ID NO: 48785 - DNA, 362 bp, Gossypium hirsutum
  Clone ID: LIB3196-056-P1-M1-D3
gtctctcccgctccttctcgctgcgatttcgtcttcaagatctcagttctcaaatcgtagcgctcttttctatcaagccatggctctggtcttgcatgcaggaaaaacaaacaaaaatgcctttaaggcactcattgctgcagaatatagtggtgtgcaggtcaaaatggttgagaattttgagatgggtgtgtcaaataagactcctgagttcatcaagatgaaccctttggggaaggttcctgtgttggaaacacctgagggtcctgtatttgagagcaatgccattgctcgttatgttgcttcgctcaaaggttaacaaccctatatgtggttctacattgattgattatggtcatatc

SEQ ID NO: 48786 - DNA, 112 bp, Gossypium hirsutum
  Clone ID: LIB3196-056-P1-M1-D4
tttcgttctctcatgatccttatagtagcgggttcaatttaaccatcataacgctcatatcgatacgcattatcttatcaagccatggctctggtctaaagaggatccaagc

SEQ ID NO: 48787 - DNA, 349 bp, Gossypium hirsutum
  Clone ID: LIB3196-056-P1-M1-D5
cccacgcgtccgctttttcttcagccgcacctctattttctccctcaaaaaagcaccagcccaccgcaaggtgcggtgaccgacgccccaagcttcgaagtatggcctattttggcctcagatcccccttctatctccgattacaacgaagtgataggggaccgacggcctagaagcgaggtacggaggaggacgtggaggcacgaggggcgctggggcgtacgagggtcgtgcgtgggagcttacggatgctggaggctgcggcgccaaggtggaaaccctagggtttctatggatagtctgatcttgggccatttggacccaatttaatttatttggatattgggtt

SEQ ID NO: 48788 - DNA, 308 bp, Gossypium hirsutum
  Clone ID: LIB3196-056-P1-M1-D9
cccttgtttatttgatattggcccctcatggccgccgctgatgacaagtaccggcgcttagggggcgggctcgcatggtccaccgactaccggtccctaaaagaagccttcagtgcgatagaggaaaccgtctaatcgaagatcattaacgatcgagagactggaagatcccgaggctttggattccttactttccgtgacgagaaagctatgagggacgcgatcgaaggaatgaacggtcaaaatcttgatggaaggaacatcaccttcaacgaagcctaatctcgcagaagtggaggcggtggcgg

SEQ ID NO: 48789 - DNA, 348 bp, Gossypium hirsutum
  Clone ID: LIB3196-056-P1-M1-E1
aaatgacttaagtacttaacgttttattccttaacataaaaagacaaaaaaggcactcaaaaagttcatacaagttattgcactacaaaacaagggtctcctcctttacataggtcaccatttttatttcattacatgcctgcttaaaactagaaaatttcacattattccgaaaacacgagactatggggttgttattgcctctaactttttattcagatgcacgctgcctttgtcgagacacgaagtaagacttttgtgggttgttgttgaatatctcatccaccaacctcgttgacaccctaaaggccaactccttgtgttggatatcccattgtcttacatggt

SEQ ID NO: 48790 - DNA, 77 bp, Gossypium hirsutum
  Clone ID: LIB3196-056-P1-M1-E10
gaaaatttgagaaacttacggcatagggaagttgggaagagagagaaaattaataaaatttaaaatttaaatgaaat

SEQ ID NO: 48791 - DNA, 68 bp, Gossypium hirsutum
  Clone ID: LIB3196-056-P1-M1-E11
aaaaaagcatgctgtactcgattcggaattcccggtgaagttattctctacttatacagggccagtct

SEQ ID NO: 48792 - DNA, 356 bp, Gossypium hirsutum
  Clone ID: LIB3196-056-P1-M1-E12
cccacgcgtccgatcaaagacccatttttgaagaatgagcagtggagcagtttcagcaagcaaagcctggattgtggcagccacaatcggagcagttgaggtattgaaagaccaaggcatttgcaggtggaattacaccattaggtcactgcatcaacatgccaagaaaaatatcagatcttcttctttcttttcttcttcttcatctttttcttctgctgctgctgtttcaaataagttgagggaggaaaagatgaggaaagctgagcagactatgaagaaagttatggatttgaactgttggggtcctaatactgttagattttaatgttcatacaaagtgctacaatattttt

SEQ ID NO: 48793 - DNA, 310 bp, Gossypium hirsutum
  Clone ID: LIB3196-056-P1-M1-E2
ctcccctatttcacgtttgcttttttttgtttctttcctctttctttttttctttcatttactttgttttgcatatatataatataatataataagttaataaatatctatttaataatcaatatttattttacatttgtatacatttttattattacacatgtcacaaattttaccataggtttgtcataatttaatatatttattacataaaaatctcataatataattatttaattaataaatatctttcactaaataataaatattttatttaatttcaaatactaatattacaattgtccacatt

SEQ ID NO: 48794 - DNA, 309 bp, Gossypium hirsutum
  Clone ID: LIB3196-056-P1-M1-E4
aaaaattaaggattttgtgtatctaaactaattactaaactaagaatgcacagaaagaaaattgggaaaaacttttgggaaaactgattgattaagacaatacccaaggaaaaatccacctagacttcacttgttattcgactctaaatcagacgatttatgcatttgacttgatccgtagaaatccctaattaatatgattatctgtctcgagactaacaacgtttaaccctaggttgattaatggaaatctctctctaataaacttcctagggctgcttaatctcaatctatggattttcttattag

SEQ ID NO: 48795 - DNA, 181 bp, Gossypium hirsutum
  Clone ID: LIB3196-056-P1-M1-E5
cccacgcgtccgctctcttctttcctcctagccaaaaaaaaaaaaaaagcctctttcctgtctctcgttctttttcctgttcaatcatgtcttgcttcattagcaaatatgctgatgagttggcttaaaaacgctgcttacattggaccccctggaaagggtttccttgctgctgatgaat

SEQ ID NO: 48796 - DNA, 204 bp, Gossypium hirsutum
  Clone ID: LIB3196-056-P1-M1-E6
ctaaacattaccaaaatatggggtttgctgtaatagtactagtagttaaagctgctttgcttgtgcagctttcactgttgttactgagcaccttcactgtctctgctcccatttggcctcaggctttttctgctcattacaaagcttgttgacctgtagtcccgcctactcacccaccaacctaccaaccataccaccactttt

SEQ ID NO: 48797 - DNA, 345 bp, Gossypium hirsutum
  Clone ID: LIB3196-056-P1-M1-E7
atgggtgacagagcgagaccctgtctcaaaaaataataaaattaaaaatatctactttgttactgacagaaccagactagagaatatgatgcaggtttactggcttggtggtctttctagtgctccctgccctgcatccacgccatggaagaacccgacagggggaactgggaacctggcaaccagacacactcacccagggccaaggccactgccgccctctgataggggcagacagaacagaaagagagggcccatctgtgatgcttgcaggagagtattgtttgagttgagaaatgggttgtgtatggccattactttgtcattcaggcctttacttcaact

SEQ ID NO: 48798 - DNA, 295 bp, Gossypium hirsutum
  Clone ID: LIB3196-056-P1-M1-E8
tcggtcattgggataaagactttcttattgttgtgacgtgagctgcttgtctagacatcaagttttatcttatcgagatgccatttcctattttgtctgaaatgcgagacatactacatattattatatacatatatcaattttttttaaaaaaattaaatttgaaaaaatatttgacctaatgagatatattaatacataccaatttcaatatgtattattactaataaaaaaatcaatacatccataaaaagggtgatgactaccttactataaaataaatgtgataatgatt

SEQ ID NO: 48799 - DNA, 354 bp, Gossypium hirsutum
  Clone ID: LIB3196-056-P1-M1-E9
gaaatagaggcaccatcatcagagtcagggacagactccaagtcgtaacaccacccagaatggaggaagaagaacgtgaggagcgccagcaggagcagcgataccgccatacgagaggagggtctcaagataatggcctcgaggaaactttctgctccatgaggatcaaggagaaccttgctgaccctgaacgtgccgacattttcaacccacaagccggtcgtatttccaccctcaacaggtttaacctccccatcctccaacgacttgagctcagcgccgagaggggtgtcctctacaacagagctggtttgattccacaatggaacgtcaacgctcacaaaatactctaca

SEQ ID NO: 48800 - DNA, 365 bp, Gossypium hirsutum
  Clone ID: LIB3196-056-P1-M1-F1
cccacgcgtccgccccccttcttcaatccggttctctttcgtagtcgatattcctctgattttcggcatacgtgggaacgctttcaaccggtgctatttgggtcgcttttctacaagtgagtgcttcggctgggaaggcggaaagaactctgtagtgaatctctgtgcatgttaggaggacaaaaccttcgctatttctgactactatcccgaaagccgattgtcagatgcgctcattatatgctccgtcaaagtttatttttactatttgaccaggtgggtgtttccatttagtattctcctttgaaactatggaagtagtgctctccaaaccatccacttcttttaagtatctatgtacaaag

SEQ ID NO: 48801 - DNA, 393 bp, Gossypium hirsutum
  Clone ID: LIB3196-056-P1-M1-F10
cgagatgccgcttgacggccctcccgccgagcccaagaagaagaagcggatgaccaaattgaagcgccctatcttgtcacccaactcagacggcgatcgtcaagggtctttaaacatcaagccgcaggtccagacaggatatggtacctgtgcggggtaccgtccaatttttagacgaagtgtgaacccaggatgtggtaactgtgtgtggtgccgtccatttttaagacgaagtgagaacctctttgatgtgagtccaggacccaggttatcagattggtccattccgatgcccctgggtgaatttccggtgctgaagttggctcaacatgacaatagtgatcaatcaatcgcttacagtcatgctggaacgtctgaaccacctcccaaaga

SEQ ID NO: 48802 - DNA, 358 bp, Gossypium hirsutum
  Clone ID: LIB3196-056-P1-M1-F11
gatcaaaatagaaaaaaaaaaaaacctaatgctctcaatcttccccaattcggccaaccccaaaacaaccacttattagctctttcggtctaaaaaaaatcaaaagaaaacacttccccgaccccgcttggcttaaacttcgacggtggagacgaggctccaacgacgcgctcgcagccggtcaagggatcaagttgctattggttttctgaaggaacaagtatggggaattctgtgcctgattgggaatatataccagaactctgtcttcttactgtttttgagaaaatagatgaaaccatcagtcgggttcaatttggtgctgttagcaaatattggcattcgctgttcaatactt

SEQ ID NO: 48803 - DNA, 381 bp, Gossypium hirsutum
  Clone ID: LIB3196-056-P1-M1-F12
atcttcagagaagaatttccccttagttctttgcaagaaggtagagataaagacactttttcaaaaatggcaatggtatcagaattcctcaagcaggcctggtttattgaaaatgaagagcaggaatatgttcaaactgtgaaatcatccaaaggtggtcctggatcagcagtgagcccctatcctaccttcaatccatcctcggatgtcgctgccttgcacaaggccataatggttaaaggtgtggatgaagcaaccatcattgacattctaactaagcgaaacaatgcacagcgtcaacagatcaaagcagcatatctccaggaaacaggaaagcccctggatgaaacactgaagaaagcccttatgggtcaccttgag

SEQ ID NO: 48804 - DNA, 394 bp, Gossypium hirsutum
  Clone ID: LIB3196-056-P1-M1-F2
gcgcctgcagctaccttcccggaatttttcaggagcaggaatacgcccctcgaccactcgtccggtcatacaaggtaattactgtagttgaaaaatggcaatggtatcagaattcctcatgcgggcctggtttattgaaaatgaagagcaggaatatgttcaaactgtgaaatcatccaaaggtggtcctggatcagcagtgtgcccctatcctaccttcaatccatcctcggatgttgttgacttgcacaaggccataatggttaaaggtgtggatgaagcaaccatcattgacattctaactaagcgaaacaatgcacagtgtaaacagatcaaagcagcatatctccaggaaacatgaaagcccacggatgaaacaatgcattaagccctt

SEQ ID NO: 48805 - DNA, 429 bp, Gossypium hirsutum
  Clone ID: LIB3196-056-P1-M1-F3
acggtgccacaagagaacacgtatgtgcaggactgctggctggtcccggtccggggtatgcccaaggccagagtcagcagtctgcaggaggtagccatgttcctacaagcctctgtcctggagcgggactcagaacagcaaaggctgcaggatgaactggagctcaccagacgggctctggaggagcggctacacagcccaggtgcaaccagcacagcagaacaggggtccagaggggagcagggcatgcatctgggagaggtctcaggagtagaggctgagcctagtcctgctggaatggaggagaagcagtcatggagacaaaggcttgaacacctgcagcaagcggtggcccggctggagattgacaggagcaggctgcagcgccacaatgtccagctgcggagcaccttagagcaggtggagcga

SEQ ID NO: 48806 - DNA, 96 bp, Gossypium hirsutum
  Clone ID: LIB3196-056-P1-M1-F4
ggaacgctggtgcgcctggacgcccggcccccgattcccggattccacccacgcatccggccgttatatcatgtatcggaatgcacacacttgttt

SEQ ID NO: 48807 - DNA, 377 bp, Gossypium hirsutum
  Clone ID: LIB3196-056-P1-M1-F5
atccaagttcttcttgacagacaacctcgtctttgactccctctgtgaccttatcacacactaccagcaggtgcccctgcgctgcaatgagtttgagatgcgactttcagagcctgtcccacagaccaatgcccatgagagcaaagagtggtaccacgcgagcctgaccagagcacaggctgagcacatgctgatgcgtgtccctcgtgatggggccttcctggtgcggaagcggaatgagcccaactcatatgccatctctttccgggctgaaggcaagatcaagcattgtcgtgtccagcaagagggccagactgtgatgctagggaactcggagttcgacagccttgttgaccttatcagctactatgagaagc

SEQ ID NO: 48808 - DNA, 282 bp, Gossypium hirsutum
  Clone ID: LIB3196-056-P1-M1-F6
cccacgcgtccgcgctctctgtagccgccgcctgcgtctctctcttcatctctctgaaccaaaaagtctttagcttttcgcttcgagagagaccatgttggtttaccaggatctcatctccggtgacgagcttctttctgactcattcccctacaaggaaatcgagaatgggatgctgtgggaagttgagggaaagtgggttgtgcaaggagctgtcgatgttgacattggtgccaatccttcagccgaaggtgctgacgaggatgaaggcgttgatctcca

SEQ ID NO: 48809 - DNA, 361 bp, Gossypium hirsutum
  Clone ID: LIB3196-056-P1-M1-F7
cccacgcgtccggtcatacaatgtagttcctggagttgtagtaagaattccagcaggaagcactgtgtacttggccaaccaagacaacagggaaaagctaaccatagcagtgctccaccgacctgttaataaccctggacaattccagaaattcttccctgctggacaggaaaatcctcagtcatacttacgaatctttagccgtgaaattcttgaggctgacttcaatacacgaagtgagcagctagactagctgcttggtgggaggcaaagccatctaaggcagctagggacagggaatgttccgtaaagccagccaagaacaaataagggcattgagccaaggagctactttaccaag

SEQ ID NO: 48810 - DNA, 375 bp, Gossypium hirsutum
  Clone ID: LIB3196-056-P1-M1-F9
atgtccgacatcctgcacaaggtgcgtatccagaagatggtggtgtaggcaccaccactcgacgcctgggacacaccacggtgctgcccgacgacatgaacaacaatgcgggaacgccggttaccgctggggactaatggagccagcccatccacctgggccccgtattgtccggggccggagggagtcccggtcctgtgggcacggggcccagctccctggtggccgcagcagcctcagtggcagcagttgctggtggagacctgggctggatggcagataccgttgccatcatcacagacgcctccttcctgtctggcctgagcgcctccctccttggagcggcgttcagacagcccactggaccctgctggg

SEQ ID NO: 48811 - DNA, 380 bp, Gossypium hirsutum
  Clone ID: LIB3196-056-P1-M1-G1
atgcagatgccagcaaccatcagacaacgtggagtccctcacgggtgaaggctgcgggggccgtgccaaggctgtgcacacgcagtccgtacgccacccttgggctccactggcagagagccccttccttctggacgccaactgcacctccggatacagcgttgatgtccattttccaggagggaggcggcctcgggtccagggagtggaggggctgcccctgccacgcaggtcctggccgatggtccctcaccctgccgccctgggcttttggcctgaagcaaattcctgagtgggagtgccagggcctgccacatcctgtcctgtccactgcctgcccccttgtgctggctccacagttctgctacggtgggagctgc

SEQ ID NO: 48812 - DNA, 367 bp, Gossypium hirsutum
  Clone ID: LIB3196-056-P1-M1-G10
cggacgcgtgggaagcaatcgcggagctcattcctaatgaagtgccaaccatagagaaaagaagaaaaaaggaggagaagaagccttccattgttgttgtccaaggtcctaagcctgggaaacctactgactgttcgaggatgagacagatactagtgaaactaaagcacaacacaccttctcacctgaagcactctccgccaccaccaccagcagctgctgctgcaaaagatcaagatgcaaaaactggtaatacttcttctgtcccagctgctcttccagtcacaagcacccctgaagctgtagtagctgcttagatagttttcattttaacttatcagcttctgtaataaaaaaaaaaaagtat

SEQ ID NO: 48813 - DNA, 387 bp, Gossypium hirsutum
  Clone ID: LIB3196-056-P1-M1-G11
acaagagggaacgaaaaagcacgttggtaccccgccgcaatttccgggataccccatacccttctgctgaatcttaacaggagagtaggtgtaaggtatggctgccatgtagtggaaactgttaatgaactaaagaaacacatgagatgggctgatccttgtccttaaccaccagaggtggaccatactgtcagacaaaaatggaggacatttgtgcgtgaacgggaacaggatgatgggatcagcaccataaggtcaacactgcctgggtcaatggttaatggtgattatgtaataaaaggaaataaccatggtttcgagacagatgaagaagaggatggtcagaatggaggtttttaagcaagtttggatagtaatttcctgaat

SEQ ID NO: 48814 - DNA, 359 bp, Gossypium hirsutum
  Clone ID: LIB3196-056-P1-M1-G12
ggaaaatggtgagcgaccaattcaaagcgaggttctcgcgaagcagagccgaatctgaaatcgtagtgtgagaggagagagaagagaggacgctgaacgactatggcgatgcttgaaagcattgtcgttttcactctccttctccttatgttgatccttatcattatcctcattctcttcgccttcaaaccatggcgtttcttctcctcccttttatctttcccttctcgttctcgctccatcaaggttgaagacgtagagaggcctctagtatcagatgatgtcaatcacagtcaagatcaaagcaatgatttgacaagaaattatgacttagagggtgcatgttaccaaagtgaagc

SEQ ID NO: 48815 - DNA, 341 bp, Gossypium hirsutum
  Clone ID: LIB3196-056-P1-M1-G2
gcctattgtgttataccatgaatagatatgtgaaatgtggccataccacttggaaatggtttaggtcataatggacatgagttataaaatgtgtcaaatacaaaaaatatgtgattgttgaaatggtaaccctaacacaaagagggtaatattatcataggataaaatgagacatgtaataacatgtatgaccttggccaagaaagttttaagggcacacttatgtcatgttagttgtttaaggagcatgtgaatgtgaatggatgcttaagggtgaccaaaggcttggaaaaatagcctttaaaatggtccacacgggtagatgcacgggcatgttttta

SEQ ID NO: 48816 - DNA, 376 bp, Gossypium hirsutum
  Clone ID: LIB3196-056-P1-M1-G3
atgaaacagcaaaaaagcacttcgttgctgggtttggacaatgaatgtgggattagtcccaagtttctagcttggaacagtagcctctttgcctgcgtgatccttgtcagctattcacagaaggaaatctgaaactccgtctttcatttcagccatggaggctgttatccttctctgtcaattagcattcatgtggttttcgctctttctagctctgtcactcttgttttcaattaaatattgccccactctgtgtgtttattgccttgccatttctctagcatatcaggtttaattacgggctcagtaataatgaggaactagcttctctcaggcaactaattacttttgtcttttttggtcggattgtgccaaa

SEQ ID NO: 48817 - DNA, 269 bp, Gossypium hirsutum
  Clone ID: LIB3196-056-P1-M1-G4
cccacgcgtccgaaacaagttttctgttgttattgtctttttgttttttggttcatagagcttgaagtagagagctagctggtggggtgatccattgtgtgaaaggagaagaatggaaaggcaaccctctccgagtcttgaaagggcatcatcgtttgagatggatgaacctctcactttaaccaagaagcaataccaagctgtattggctgcggtgatcaaagcctccgccaaagaaaaaggaaaagctgccgttctacctgatggtg

SEQ ID NO: 48818 - DNA, 279 bp, Gossypium hirsutum
  Clone ID: LIB3196-056-P1-M1-G5
ctgtattatatatatcatttggtacgttcaattgctcaatacctatttacaacgtattatatagaacttactagtctaataataaaaaaattaaacttatctactatcatgcaaaatttatagtaaatacaatcaacccatatgcatgctcctaaccaatcatttgtatttctaaaagctcaagcccataattgtcaaaaaaataaaataaaattaaataattaaaaataataataaaaataaatataatataaaaaaaataattaaaaaaattaatgg

SEQ ID NO: 48819 - DNA, 391 bp, Gossypium hirsutum
  Clone ID: LIB3196-056-P1-M1-G6
atcccgcactgtgtcattatgccaagagaggtttgggcattctaaagaagtatgaggaatacttgatcaataacatagcatagttctttatttgtgaatcacttctctcctagactatgagttactttagaacagagatttatttttccctgtatccctagggtttggcacatggtcggtgcttagtaaacttattttgtattcaataatgccaagtagaataattcataaattatggaaaaataaaagaatttggcaaaattgcaagctcgaagatcgctttcaggaaaaatgtttcaacccctgctcaaaagtacatagcttgctgtgttgttgaagtgccagcatgaggaggatcatgccaacacatccatttattgcccattctggg

SEQ ID NO: 48820 - DNA, 357 bp, Gossypium hirsutum
  Clone ID: LIB3196-056-P1-M1-G7
ggaaactggcgcgcgaccaattgaaagcggggttgttgcgaagcacacccgactctcaaatggacgtgtgagaggagagagatgagaggaccctgagcgactatggggatgctagaaagcattgtcgttttcactctccttctccttatgttgatccttatcattatcctcattgtcttcgccttcaaaccatgacgtttcttgtcgtcccttttatctttaccttctggttctcgctccataaaggttgaagacgtaaagaggcctctggtatcagatgatgtcaatcacaggcaagatcaaagcaatgatttgacaggaaattatgacttatagggtgcatgttaccaaagtgaa

SEQ ID NO: 48821 - DNA, 241 bp, Gossypium hirsutum
  Clone ID: LIB3196-056-P1-M1-G8
gaaagttgtttcataaactatgaaaagatgacaccttaaaaggcagtttttaaaaatatttggtcaactaatggggcacccactaaccaagatttttcaacttttcagttgctttaaaatgccggatgactatctaatgttctacatttacttcttcaccaactttactcatgatcctttgagaggatcagaatttactggttgtggcttaactgtgtcgatatcacactttcaaatggtc

SEQ ID NO: 48822 - DNA, 246 bp, Gossypium hirsutum
  Clone ID: LIB3196-056-P1-M1-G9
aaaagagatagggattgccttctgcgaatgtctagtaagcatttatccttctctaacccctcggaaaagaaggagaatagctttatcccgtcccccatatgcccttcgttctcctgaagtatggaagtctgttttccctttcaagtcccttcaatgctgtcgcattgatgtccctttcgctactttcctatcggttttattcatgcctttccttatgttccgatggttttatgattctccttgttc

SEQ ID NO: 48823 - DNA, 276 bp, Gossypium hirsutum
  Clone ID: LIB3196-056-P1-M1-H1
cctctaggaaggcaattggaatgtcacacacgtgggttctgaacaagaagcgaacgtagctgcttgtgaaagtgtgcccatgcggccgcaaatggacgtgagaggaatcctacatggctgccatcgaggctgggatgtagaccgtgctgctagatgatacaccgtgactgtggggatgactctgtacatgaagagagacgttgcatatgagaaatactcacatgctttggttgaatatggaccagatgaatctgagtgtgtggtagagttgacgta

SEQ ID NO: 48824 - DNA, 175 bp, Gossypium hirsutum
  Clone ID: LIB3196-056-P1-M1-H11
atacaccacccgctgccgtcaattcgtacgggcagaccggggacagcagctgcaagacacccgaggtctaacttcctgccggaggaggccactgaggaggctggggcccgaggtggcgcaaaggaggaggtggaaaaaaactccttagtaaaaaactagtaaattggaaaggcta

SEQ ID NO: 48825 - DNA, 359 bp, Gossypium hirsutum
  Clone ID: LIB3196-056-P1-M1-H3
agaaggtggaccgagcacacgcctaaggaaaagaacccgaaagccactgaaacagccggaaacaaaaccaaaagagaagaagcaagccggtaagaagaaagtgaagaatgctttgaattcgaaaaccttatctggtcaaaactctgcaaaagtaagagacgaagaagtggaatatcagtgtgacatggaaggctgaacgaagagttacggctcgaaacaagctctaatcctacacaaaaggaacatttgtccagtcaaagggtgcgggaagaagctctactcccaaaaaaaactggttcagcatcgtcgagtacattaagatgaccgaccttttaaatgcccatggaagggctgtaaga

SEQ ID NO: 48826 - DNA, 350 bp, Gossypium hirsutum
  Clone ID: LIB3196-056-P1-M1-H5
gctttggttgagttttagggccaattctgtattgcttttcaaaagcacttcttgctccaaaagcacttctagaagaaaagctgtgcagaacaagctgcttttagctgaaatttttagcttttcagaagtgcttttgaaaagcacttctgaaaaggaaaagctaaaatttttaacttttccttacccaaaagcgcttttaggctgggttcatcctttgttatttacttttaatttgtgtttgaatcaaaatagttggcataattctgtggggattattttttattattttaatatcagtattaggatgtttcgatgtaagaaattaaattcatcaatattttttaaatatt

SEQ ID NO: 48827 - DNA, 364 bp, Gossypium hirsutum
  Clone ID: LIB3196-056-P1-M1-H9
tatgctttcttgatggttgaccgagcacacgcttaagggaacaaggcccgggcagagggccgcggccctgccaccccactgcacctggacctgacccagctgaacaggctgagcctggagaacagcccagacgcccttgaccacgctttggaaacttcacacttacccttttatgccgacccttacacgctccccgccaccttctaccgcagggtcaccgatgtccggggcctggaggagttcctcagtgctatgcagagctcacctggacctgtgcccttgagcccactcccattggtacctgtgtctgtgcctgcctttgaccccggctccagctccttcggcccattgggcccctacttgt

SEQ ID NO: 48828 - DNA, 376 bp, Gossypium hirsutum
  Clone ID: LIB3196-057-P1-M1-A1
agctgagctcctcccctgcacggtccggtatcgccatttcgacccacgcctcccgaagattccttatgtgcttatgcaagtcaagctgaaaaggaggaagtggattcccactcgatttatgttggtaatgtgaggtttatcaaccctttcctatgccttatatatgtttatttaggtaaattggctcatttaccttacttgtggtccaattattatcttaatgttaaaaatttacttgtaagttagctgaaagtatgattgtgcttttgtttggccagtaagggtatcggaaagcttttcatttccaaatttatgtcagtgcatatcatgttgtgtgaaatgcgtttttatgtgcatgtaatcgcatgaaaaatca

SEQ ID NO: 48829 - DNA, 362 bp, Gossypium hirsutum
  Clone ID: LIB3196-057-P1-M1-A10
atccccttcgtggtgcctgtggcttctccgtctggcgatgcccgccgtctcactgtttctagccttcatgagtcagggctaaaggtcaaccagccagcctcttttgcagtcagcctgaatggggccaagggggcgatcgatgccaaggtgcacaggccctcaagagccctggaggagtgctatgtcacagaaattgaccaacataaatatgctgtgcgcttcatccctcgggagaatggcgtctacctgattgacgtcaagttcaatggcacccacatccctggaagccccttcaagatccgagttggagagcccggtcatggaggggacccacgcttggtgtctgcttacggagcaggcct

SEQ ID NO: 48830 - DNA, 362 bp, Gossypium hirsutum
  Clone ID: LIB3196-057-P1-M1-A11
ccgcttttacgaggcttgccctcgtaatttccagcagcaactccgagaagtggattcctgcgttgttgccttcgaaataaacaaaggatcgatcttcgtaccgcactacaattcaaaggctacattcgtggtcctcgtcaccgaatgaaacggccacgtcgaaatggtctgccctcacctttctaggcagagctcacactggtcctcccgagagggagaagaacaagaagaacaagaagttggatggagaagtggacaattcaatgtgagtgggagcccagtttttaaccggtgacctatttttagttccagcagagccattcagtcacattcgttgcctcccaaaacgaggacctaagatt

SEQ ID NO: 48831 - DNA, 339 bp, Gossypium hirsutum
  Clone ID: LIB3196-057-P1-M1-A12
atggccgtctgctttagacccaggaagagccgctgctgggatggaatctggttgcctgctggaggattccctgttgctcaggggaggtcagtcttttgttctagccaggccttcaactgaacgaggcccacccacaccagggagggcggcctgctttactcaaagcccagcaattaagatgttaatctcacccaaaatcaccctcccagaaaaatccagagtagggttcaaccacgtatctgggcactgtggcccaggcaaattgacataaaagtaaccatcacagacagcaacctaaatcctgttgaacgagaggccgactcatttcgtcagatacct

SEQ ID NO: 48832 - DNA, 202 bp, Gossypium hirsutum
  Clone ID: LIB3196-057-P1-M1-A2
ttccccttgcttgcaacgccttagcttttctatagggtaacctaattcaaatcaactggccgtggttctacaccttcgggcctggaaaaaccctgacgttaccaaacttattggccttgaagcaaatccccttttggccagttggcttaataccaaaaaggcccgaaccattcgcctttccaaacatttgcccagcctgatt

SEQ ID NO: 48833 - DNA, 332 bp, Gossypium hirsutum
  Clone ID: LIB3196-057-P1-M1-A3
gaaatccctaaattatgttaatatctctttcgagagtaagaacaacttactctagggtgattaattggaatatctttctaattaaaacccctatcgtcgcattaactcgatctctggattcccctattagatttgactctaatccagtagatttatgtcatcctatttttgcatgaaactccgcttaattatgctagatctactcttaaataggaacttttgcttcactgaaataagtacattaaacttgaattaatatctcaaaaatattaaaacaagaaataagcatacataattgagaacaggaatcaagtatttatcgcgtaaatcag

SEQ ID NO: 48834 - DNA, 397 bp, Gossypium hirsutum
  Clone ID: LIB3196-057-P1-M1-A4
atgagaaattatctccatggttaatagtggtagagatgaacaagcacccactccagatgaccactgcagcctgtgagtattggctgtgtggccagaagaaagacaaatgaaatccgaatgggtattttgaaactaatcaacataatagacataaatcaggtgtttgaatccctttcgtcttgagggtatacattcttcaggtcaacccacactactcccttctggttgtgtaagtaatggagcaaatgcagagtaaaacaaatctggaaaaacagtggctaaggagctagtatcactttctagtttatcacatgaggattctcttatgtttcaggtggccattaaacgcgaaaatcttgtggctgaaattcagaagcgactgtctgagtcttgatcc

SEQ ID NO: 48835 - DNA, 352 bp, Gossypium hirsutum
  Clone ID: LIB3196-057-P1-M1-A5
cccacgcgtccggttttgagggtgataacatgattgagaggtctaccaacttggactggtacaagggccctacacttcttgaggctcttgaccagatcaatgagcccaagaggccttcagacaagcctctccgtctaccacttcaggatgtgtacaagattggtggtattggaactgtcccagttggtcgtgttgaaactggtgtcttgaagcctggtatggttgtgacctttggtcctactggtctgaccactgaagttaagtctgttgagatgcaccatgaagctcttacggaggcgcttcctggtgataatgttgggttcaatgttaagaatgtcgctgttaaggatct

SEQ ID NO: 48836 - DNA, 408 bp, Gossypium hirsutum
  Clone ID: LIB3196-057-P1-M1-A6
atgctgaccaatcacagcagcagccgccgcacagtaaaactgcacctttacctctcagtcaccttctatactggtgtcactgggaccatcttcaaggagaccaagaaggaagtggagctggcaccaggggcctcggaccgtgtgaccatgccagtggcctacaaggaataccggccccaccttgtggaccagggggccatgctgctgaacgtctcaggccatgtcaaggagagcgggcaggtgctggccaagcagcacaccttccgtctgcgtaccccagacctctccctcacgttactgggagcggcagtggttggccaggagtgtgaagtacagattgtcttcaagaacccccttcccgtcaccctcaccaatgtcgtcttccgactcgagggctctgggttacag

SEQ ID NO: 48837 - DNA, 178 bp, Gossypium hirsutum
  Clone ID: LIB3196-057-P1-M1-A7
gaagattcctcaagtgcttatgcaagtcaagctgaaaaggaggaagtggattccagctcgatttatattggtaatgtgaggtttatcaaccctttactctgcctgatatatgtttattcaggcaaattaactcatttaccttacttatgatccaattacaatctaaatgttaaaaatt

SEQ ID NO: 48838 - DNA, 189 bp, Gossypium hirsutum
  Clone ID: LIB3196-057-P1-M1-A8
ttccccttccttccaacgtattagttttttattagggcaacctaaatcaaatcaattgcccgtggttttacaccttgtgacctggaaaaaccttgccgttcccaaactaattggctttgaacacaatccccttttggccagttggcttattaccaaaaaggccggaaccattcgcctttccaaacattt

SEQ ID NO: 48839 - DNA, 363 bp, Gossypium hirsutum
  Clone ID: LIB3196-057-P1-M1-A9
gcatggatcgaataaatgcattcgcacatggctgacttttaataaaatggttcactggtgaacgaacagctaactctagtgagcacttgcagaaagccagtttacaattcaaagctccatgaagggattaactggaactctggactgccttatgagctgtgactgtcatatattcgacttacggcacgctagtgtctgatgaacctccactaaatcatgctagatctactcttaaataggtactgctgcttcactgaaataagcacatgaaacttgaatgaatatctcagaaatattaaaacaagaaataagcatacataattgtgaacaggaatcaagtattcatcgcgtaaatgagaaatc

SEQ ID NO: 48840 - DNA, 369 bp, Gossypium hirsutum
  Clone ID: LIB3196-057-P1-M1-B1
atcgatgaagtggattcccttaaggaagccttgccatacaatggtgcactggtgaagcggaacgaccactaccagcatacattgcagaaggcacgtaacatgacaaaggtgcctcttgattcacaaaaggatgaccagatgacagaggcttcacggatgacttcttaaggagcaggggaggtagtcgcccaggtgaccagcgaacaggccccgccatgggcagcctcttcagagatggcccttccctgcgaggatccaacataggatttccgtgatcccacagaagatgatagagcacagagaccacgactccagcttaaacctcgaacagtcgcgactcctctcaatcaagtagccaatcccaactct

SEQ ID NO: 48841 - DNA, 386 bp, Gossypium hirsutum
  Clone ID: LIB3196-057-P1-M1-B10
atctgatggttgtttttagttgataggggtgtcctggtggatgtaaatgtattaggcttggttggaaggcaatcccacattaaaattcccatcagtagtagccatatcgaattttctggggcttcaaaggtgaactagtaagagtactttccagaatctagtgagtatatttttctgtttgtcaatcggtcaaaatagcgccttttgttttagcttctctctgttaaggggaaagaaggaaagctgtaattgccatacaattgctgagcctccactgccttaatgatcccctctgctgtgattatgactccttttgggtttcaacagccaatcaggttgagtatctgatcaatgaaaagcacatctacctgctgccaagatgtcga

SEQ ID NO: 48842 - DNA, 398 bp, Gossypium hirsutum
  Clone ID: LIB3196-057-P1-M1-B11
agtgacagcgtttaacaaagcttagagaaacctccaggagactgctatcatggcagagaaacccaagctccactacctcaatgcacggggcagaatggagcccatccggtggctcctggctgcagctggagtagagtttgaagagaaatttctagaatctgcagaagatttggacaagttaagaaatgatgggagtttgctgttccagcaagtaccaatggttgagattgatgggatgaagctggtgcagaccagagccattctcaactacattgccagcaaatacaacctctacgggaaagacataaaggagagagccctgattgatatgtatacagaaggtatagtagatttgactgaaatggtccttcttctgatcacgtgtcaacctgaggaaa

SEQ ID NO: 48843 - DNA, 383 bp, Gossypium hirsutum
  Clone ID: LIB3196-057-P1-M1-B12
agaacatggaaatgattggaaaatctgatccttatgttgtcgtgcatatccgacctctcttcaagattaaaacaaaagtcatcgagaacaacctgaatcccgtttggaatgaaacatttgagttgattgccgaagatcgagagacacaggaactcactgtagaggttttcgaccaggacattgggcaagacaagaggttgggaattgcaaaattccgtttgattgaactggaaccggagacaccaaaggaggttaatctgaaccttctgtcctcacttgatacacttaaaataaaagataacaaggacaggggaagttgtaccattaagcttttgtaccatcaatttaacaaggaggaacagttgattgctttggaagaagag

SEQ ID NO: 48844 - DNA, 376 bp, Gossypium hirsutum
  unsure (1)..(376): unsure at all n locations; Clone ID: LIB3196-057-P1-M1-B2
atcccgacgcatgtggctccagcccggcctggccgccagggagcgccaccggcttccctccgcccaaagggagctctggaccctcagggcccccgcagaggacggatccagctcctgtacatatattttattgcatgcactgtgaccttggggggagaacagaagggggacgacgcccccgcacctcctgcgatctggctggcttggatctcgtttttaaccccctccttccccgcttgccctatagatatggcctgtgttctgctctcctggccccagtgcaccgtctgctctgtgaactcctnccaccaagcccctctgaccccacgcgtgtctgtccccctcgttctgtagcgtttgtacataataaaacaat

SEQ ID NO: 48845 - DNA, 91 bp, Gossypium hirsutum
  Clone ID: LIB3196-057-P1-M1-B3
tggtcgcgagggctcaatcgtaccataacatactggaaccccaagtggagcgaatatctatgcattatacctacgggcatgagattatgca

SEQ ID NO: 48846 - DNA, 406 bp, Gossypium hirsutum
  Clone ID: LIB3196-057-P1-M1-B4
atgaaacagaccatgctggagagtctcagcacagaaaagaactcactggtctttcaactggagcgcctcgaacagcagatgaactccacctctggaagtagtagtaatgggtcctcgattaatatgtctggaattgacaatggtgaaggcactcgtctgcgaaatgttcctgttctttttaatgacacagaaactaatctggcaggaatgtacggaaaagttcgcaaagctgctagttcaatcgatcagtttagtattcgcctgggaatttttctccgaagataccccatagcgcgagtttttgtaattatatatatggctttgctccacctctgggtcatgattgttctgttgacttatacaccagaaatgcaccacgaccaaccatatggcaaatgaaccaagc

SEQ ID NO: 48847 - DNA, 409 bp, Gossypium hirsutum
  Clone ID: LIB3196-057-P1-M1-B5
atgctatgtgtaaggaaaaactggaaaaggaagcagctgaaaaaaaaaagaaagaggatgaaaacaggagcaatacgggagaaaggagcaatgacaaagaggatctgtgtcgtgaatttcgaagcatgcggataaatgggaagcttatctgcaccagagaaaataaccctgttcgaggcccatatggcaagatgcacatcaataaatgtgctatgtgtcagagcatcttcgatcgagaagctaatgaaagaaaaaagaaagatgaagagaaatcaagtagcaagccctcaaataatgcaaaggatgagtgcagtgaatttcgaaactatataaggaacaatgagctcatctgccctagagagaatgacccagtgcgcggtgctgatggaaagttctatacaaacaagtg

SEQ ID NO: 48848 - DNA, 408 bp, Gossypium hirsutum
  Clone ID: LIB3196-057-P1-M1-B6
atttccctctcacctccagcctctcacgctctcctcagctctctcacctcctggaaccatggccagcacatccaccaccatcaggagccacagcagcagccgcaggggcttcagtgccggctcagccaggctccctggggtcagccgctctggcttcagcagcgtctccgtgtcccgctccaggggcagtggtggcctgggtggcgcatgtggaggagctggctttggcagccgcagcctgtatggcctggggggctccaagaggatctccattggagggggcagctgtgccatcggtggcggctatggcagcagagccggaggcagctatggctttggtggcgccgggagtggatttggtttcggtggtggagccggcattggctttggtctgggtggtggagccgg

SEQ ID NO: 48849 - DNA, 373 bp, Gossypium hirsutum
  unsure (1)..(373): unsure at all n locations; Clone ID: LIB3196-057-P1-M1-B7
atccagaacacaggtgtcgtgaaaactacccctaaaagccaaaatgggaaaggaaaagactcatatcaacattgtcgtcattggacacgtagattcgggcaagtccaccactactggccatctgatctacaaatgcggtggcatcgacaaaagaaccattgaaaaatttgagaaggaggctgctgagatgggaaagggctccttcaagtatgcctgggtcttggataaactgaaagctgagcgggaacgtggtatcaccattgatatctccttgtggaaatttgagaccagcaagtattatgtgactatcattgatgccccaggacacagagacttcatcaaaacatgattaccaggacatctcangctgact

SEQ ID NO: 48850 - DNA, 271 bp, Gossypium hirsutum
  Clone ID: LIB3196-057-P1-M1-B8
atgcaaccgtccatgctcgcgagtgctaactcggacaataacatactggtacctcaagtggagcgcatatctctgcattttaactacaggcatgggagtatgcaatatgcccactttattagatctgttcggacttacaatggtggaagggagaacaatgcgaaaagttcctgttctttgctttgacacagaagcttatcttgcatgaatgtgcggaaaagttttcatagctgctagctcaatagatcagtgttagtaatagactgaggat

SEQ ID NO: 48851 - DNA, 407 bp, Gossypium hirsutum
  Clone ID: LIB3196-057-P1-M1-B9
atctgatggttgtttttagttgataggggtgtcctggtggatgtaaatgtataaggcttggttggaaggcaatcccagattaaaattcccatcagtagtagccatattgaattttctggggcttcaaaggtgaactagtaagagtactttccagaatctagtgagtatatttttctgtttgtcagttggtcaaaatagcgccttttgttttgcttctctctgttaaggggaaagaaggaaagctgtaattgccatacaattgctgagcctccactgctttaaggatcccctctgctctgattatgtctccttttggttttcaacagccaagcaggttgagtatctgatcaatgaaaagcacatctacctgctgccaagtggtcgaatcaacgtgagtggcttaacca

SEQ ID NO: 48852 - DNA, 259 bp, Gossypium hirsutum
  unsure (1)..(259): unsure at all n locations; Clone ID: LIB3196-057-P1-M1-C1
atgcccaggccaagcaagcttctgtctgcacctgctctcaatcctgctctcactatgagcctncgcctgcagagctcctccgccagctatggaggtggttttgggggtggctcttgccagctgggaggaggccgcggtgtctctagctgttcaactcggttcgtctctgggggatcagctggaggctacggaggcggcgtgacctgtggctntggtggaggggctggtagtggctctggaggtggctcggaggtgcctt

SEQ ID NO: 48853 - DNA, 387 bp, Gossypium hirsutum
  Clone ID: LIB3196-057-P1-M1-C10
cccacgcgtccgctgcccaacaccaccaaccaaggacacttgccccattgacacactgaaattgggtgcttgtgtggatctgctgggagggttggtgcacattggactaggtgacccggttgtgaaccaatgttgtccggttctttcaggactcgccgagctcgaagctgcggtctgcttgtgcaccaccctcaaacttaaggttctcaaccttaaaatttatgtgccactggctcttcaactccttgtcacatgtgggaaaacaccccctcctggttacacttgctctctctaaaaccaaggttgctaggttgatggactctatatgatggaatggacatgagaggatgtcgagcttttctctttgtttcttagttggattggaaa

SEQ ID NO: 48854 - DNA, 404 bp, Gossypium hirsutum
  unsure (1)..(404): unsure at all n locations; Clone ID: LIB3196-057-P1-M1-C11
atgtagcctccttgggctactcccacaccggcccggcttccttcggagagtccagccctccatctgagaagcccgggtaatcagctctgcagagcctgcaaggtttagatgcaaaatgcgtctgcaaggttttcaaaacatttctttctggattgtaaatcaagtactttaagaatggtaaaccggctggggtgcggagttaatgtatgtcttgaaaaaacaccatcgtgatttgccttttaaatttgagaaaagaattccacttcgcttagtttcattagagatattgagatttccagggggaagtgctaagaggaggctgtggtaggtgttagctccttccttggaagggcggngaatggtgaatggcttagggctcaactttcatctatttggctgaaggg

SEQ ID NO: 48855 - DNA, 405 bp, Gossypium hirsutum
  Clone ID: LIB3196-057-P1-M1-C12
atgggaggctggcgcaggcaggggtgaggagcacagcaggcggcgagcgggaggcactggcctccagagcccgtggccaaggcgggcctcacgggcgacgacggagccgggatcggtgcctcagcgttcgggctggagacgaggccaggtctccagtcggggtggacgtgcccaccagctgccgaaggccgggacgccaggtccggcggacttgccgagcgggacatgacatggtccggtgtgacggcgaggacagaaggggcgcgtccggccttcctgaacaccctaggctggtggggctgcggcaagaagcgagtctgtttctttacttctcccacggagtcggcacactacagctgccctctgggctcccagaacccacatcatgaaagaatggggctaccc

SEQ ID NO: 48856 - DNA, 341 bp, Gossypium hirsutum
  Clone ID: LIB3196-057-P1-M1-C2
cccacgcgtccggttctctgttggctctccttgctgggctcattggcttgagcttccacaattcgccttccttctgattctcgtaaagactccttgactttgcattacgagtccctctgcccatacagtgccaatttcattgtcaattacctgcccaagctcttcaatgaggatctcattcccatctgcgatctccgcctcgttccttggggaaacgcttagctcaaaggcaacgacacctttgattgccagcatggccctactgaatgcttgctaaacactgcggaagcttgtgcaattgatgcctcgcctaaactgaatgaccatttaccgcttatcta

SEQ ID NO: 48857 - DNA, 232 bp, Gossypium hirsutum
  Clone ID: LIB3196-057-P1-M1-C3
aaatgattcagaagatggatgaggaacataaagcccagagagtggtggatagaagaattttgtgatgaactaactaataagatgaatatatagaagaaaaggggtcttagttccagtaacaatggagaactcttgtggcaatgagatgatgaattagtactaaggaaaaagaaaatgaacatcgcatgcaccattgattggtggttagatggatttagtggtgtattcaaaa

SEQ ID NO: 48858 - DNA, 390 bp, Gossypium hirsutum
  Clone ID: LIB3196-057-P1-M1-C5
ctccctttttctcatcgtcctgaaactacagatttcagcttgcaaaataaaattaaaagttcagaaaatggttggattgggatccatttccacaccaatgtgcaccacttcaccattaccttctaaacccaatcccagaaataattttccaggaaaactttcacacccacttcttggatttcacaaagttcattctttgtctctgtcaactcatttctcccctcagaagaacaaattaactcaaacccatttcactttgaaagcttcttcagtaggaactgcagattacactgaggaacccgcaaccaaagtgaaatttcggacatccttaagtgtgcctgattgctcaacctcattgtctttgcttggaacagggtacagggagaaagt

SEQ ID NO: 48859 - DNA, 214 bp, Gossypium hirsutum
  Clone ID: LIB3196-057-P1-M1-C6
cccacgcgtccgaaaaaaaaaaaaaaaaaaaaaaaaaaaaaaaaaaaaaaaaaaaaaaaaaaaaaaaaaaaaaaaaaaaaaaaaaaaaaaaaaaaaaaaaaaaaaaaaaaaaaaaaaaaggctcttataaaaaggaaaccaaattaaattaactgaccatacaatttaaaacgtacatgactggaaaaaacaaaggcgtatcccaagttaatgg

SEQ ID NO: 48860 - DNA, 353 bp, Gossypium hirsutum
  Clone ID: LIB3196-057-P1-M1-C7
gttgtaagttatccattctgcttctatctaaagtgatgctaggctgcttcacacaggtgcgcttcgctcggccacatgatgaacatgttttgagctaactgcatgtcgagcgcttaagcggagcttgtggtcactcgttcctcgcttgttccaatcctagtaaagagcttcagatccgattctacactacatacgatattccattccggccctcactagctcttcgcttggttctacaaggagcatgcccgagggggctactacgctcaccgagcatttgcatcaccacctgagcttggttaccggcttgaccagcttctacgcctaccacgaacttgtatcatcacgtggct

SEQ ID NO: 48861 - DNA, 73 bp, Gossypium hirsutum
  Clone ID: LIB3196-057-P1-M1-C8
aaaagatgcggtagatggagaggaacatgaaggccagagtgtgttgaaatgaaaaattttgcgttgaacttac

SEQ ID NO: 48862 - DNA, 287 bp, Gossypium hirsutum
  Clone ID: LIB3196-057-P1-M1-C9
agaacagcaagccgggcccgttccggtcctccattcctgtgctggcgctgttaacacacccgcgatgtagagactcgcctgaccctcaagtgcccatgctcttaatctccgcggtggtgattgtcccccgcatcacctgggtcgatgctccaacgacctacagactgacgtacaatgctcgggcttctaccaccatactgcggtacacagacgccatcgcgttttgaagtgacactcacatggtcaaatctgacaagtacatgcacataataaactctgaccaggaa

SEQ ID NO: 48863 - DNA, 245 bp, Gossypium hirsutum
  Clone ID: LIB3196-057-P1-M1-D1
gtgaccttgggttgagtgtagagatgaggaaaatcatgggtgccaaagttctcttcttctttgctttgctttccttttcagctgtgtcggcatttgcacaggatgaggaagaccaaggtcttgttatgaacttctacaaggattcttgtgcccaagctgaaaacattatcaaggagcaagttaagctactgtacaagcgacacaaaaacactgctttttcttggctgagaaacattttccatgac

SEQ ID NO: 48864 - DNA, 405 bp, Gossypium hirsutum
  Clone ID: LIB3196-057-P1-M1-D10
atccagcaacctcacacagttttgaagacaatttcatttaaaatctttaatgtaagagatgatgatgaagggagggaggaaattggtattttgatcctcctcggatagcacaaaagtggcctagggaatgaattcaggaaagttacaaaatgcagttgtcaggatgttggatatgcttcaggatcaagtacacgctcagtcaattacgtgtccctccatgcagtatccctggggccaatattggatttatccaaccctgctgcttgtccgattcctaaatgatttaagggtttaaaattaactatgactgtaaaaaatctcaagggaactgtggctccccagtctgtcatgaaaaatattctcgggaaaagaaagttgaaaaggagattatattgtcgctgtgtt

SEQ ID NO: 48865 - DNA, 408 bp, Gossypium hirsutum
  Clone ID: LIB3196-057-P1-M1-D12
atgtcttttctttccctgattccaggccctggaggaagcactgagcatccaaaccccaccatcctctccaccaacagcatttggtagcccagaaggagcaggggccctcctaaggaaacaggagctggtcacgcagaatgagttgctgaaacagcaggtgaagatcttcgaggaggacttccagagagagcgcagtgatcgtgagcgcatgaatgaggagaaggaagagctgaagaagcaagtggagaagctgcaggcccaggtcaccctgtcgaatgcccagctaaaagcattcaaagatgaggagaaggcaagagaagccaacagacagcagaagaggaaagcaaaggcctcgggagagcgctaccacgtggagccccacccggaacatctctgcggggcctaccc

SEQ ID NO: 48866 - DNA, 390 bp, Gossypium hirsutum
  Clone ID: LIB3196-057-P1-M1-D2
cggacgcgtggggaaagatcaacagcagcgccaccgccctgaagatccccagaggagatacgaggtgtcagcaagaatgccgacaacaagaagaaaggcaacgaccacaatgccaacaaaggtgcttgaaacgattcgagcaagaacaacaacaatcccagaggcaattccaggagtgtcagcaacattgccaccagcaagaacaaaggccggaaaggaagcaacaatgtgtgagggaatgcagggaaaggtaccaggagaatccatggaggagagagagagaagaagaagcagaagaggaggaaactgaagaaggagagcaagaacaaagccataaccctttccacttccatcgcagatcattccaatctcgattcaaggaagaacatg

SEQ ID NO: 48867 - DNA, 403 bp, Gossypium hirsutum
  Clone ID: LIB3196-057-P1-M1-D3
atactttcttaagagctttcgtcactgaattactaagcttattcttcttccaggggccactaaatatagatgttgctccaggagctccccaggaaaagaatggagttcacagaaagagtgatcctgaggaactaagggagccgcagcaaagcttttctgaagctcagcagcagctgtgcaacaccagacaggaagtgaatgaattaaggaagctgctggaagaagaacgagaccaaagagtggctgccgagaatgctctctctctggccgaggagcagatcagacggttagagcacagtgaatgggactcttcccggactcctatcattggctcctgtggcactcaggagcaggcactgttaatagatcttacaagcaacagttgtcgaatgacccggagtgg

SEQ ID NO: 48868 - DNA, 405 bp, Gossypium hirsutum
  Clone ID: LIB3196-057-P1-M1-D4
atggaacttgatgggggccgaagaatgtactatttttaagtaatgtggtattgtaccacaaagtagatctaaataagctttatgctgtatttgaactaactggggcatgttactgggaggaggttggggggatttttggttatgttaaatgtttgatgtttaaattgttgcatgttgaattcaaactttttaacaagtccttgatgtttcaatttgaaagtgaccaatggggctgaggctgtgtccactgaggctaagatgactgcctttcctgattggccttggcttttgcatacattgtgtgacccttgccctatgaccctttggctgaccttaccggaagccatgacgacagcagccttttgccattagacgcatggtgatggtgaggattccaagggttag

SEQ ID NO: 48869 - DNA, 409 bp, Gossypium hirsutum
  Clone ID: LIB3196-057-P1-M1-D5
atgtggagcaagatggctgtggagctgggcgtgctggttgtccggccctggcccggaaccgggctgggcagagtgatgcggactcttctgctgctactgtggttggcgacgcgcggaagcgcgctctactttcacatcggagagacggagaagaagtgctttattgaggagatcccggacgagaccatggtcataggaaactaccggacgcagctgtatgacaagcagcgggaggagtaccagccggccaccccggggcttggcatgtttgtggaggtgaaggacccagaggacaaggtcatcctggcccggcagtatggctccgagggcaggttcactttcacctcccatacccctggcgagcaccagatctgtcttcactccaattccaccaagttctccctgtttg

SEQ ID NO: 48870 - DNA, 407 bp, Gossypium hirsutum
  Clone ID: LIB3196-057-P1-M1-D6
atcgggaggtggcgagcgccatggcgagcccgggccgcctactgtgcgtgctgggcctgctactctgcggggcggcgagcctccggctgtccagaccccacggtgacaccgccaagaagcccatcatcggaatattaatgcaaaaatgccgcaataaagtcatgaaaaactatggaagatactatattgctgcatcctatgtaaagtatttggagtctgcaggtgcaagagttgtaccagtaaggctggatcttacagagaaagactatgaaatacttttcaaatctattaatggaatccttttccctggaggaagtgttgacctgaggcgctcagattatgctaaagtggccaaaatattttacgacttgtccatacagagttttcacgatggagactattttcct

SEQ ID NO: 48871 - DNA, 369 bp, Gossypium hirsutum
  Clone ID: LIB3196-057-P1-M1-D7
ggcacgcgtccttgaatgatgatagagagatgccgccaaccatgggtgccaaagatgatattcttatttgctttgctgtccttttcagctgtgtcggcatttgcacaggatgtggaagaccaaggtcttgttatgaacttctacaaggattcttgtcctcaggctgaagacattatcaaggagcaagttaagctactgtacaagcgacacaaaaacactgctttttcttggctgagaaacattttccatgactgggctgtccagtcatgtgatgcttcactgctgctggactccacaagaaggagcttgtctgagaaggagacagacaggagctttggcctaaggaatttcaggtacattgagaccatt

SEQ ID NO: 48872 - DNA, 406 bp, Gossypium hirsutum
  Clone ID: LIB3196-057-P1-M1-D9
attgaaatttggggtgggatagcaggtcagttgatcttctgcaggaaggtgcagcttttccatatcagctcaaccacgccgccagtccattcttaaggaactgccgactaggactgatgatgcattttagctttgagcttttgggggttattctaccaacaaacaaacagtccattggaaagaaaacagtcccaggaattaacagatcagaatgttcacactggttaatctttttctaacagtgagcatgaaggtagcagaagctggtgtgtttccagatggttcttctaaccaaactaattttcactgttgacaagtgaggcaagggttgcactggaccgaaggctgaggcttggccatctagcattccatgcagaatggtttcccataagcattccttttattc

SEQ ID NO: 48873 - DNA, 404 bp, Gossypium hirsutum
  Clone ID: LIB3196-057-P1-M1-E10
atgtcccgcgcgctcctccgctcgctccactccgctcggccccgcgccgtccgtcaacatgatccgctgcggcctggcctgcgagcgctgccgctggatcctgcccctgctcctactcagcgccatcgccttcgacatcatcgcgctggccggccgcggctggttgcagtcgagcgaccacatccagacgtcctcgctgtggtggaaatgttcccaagagggtggcggcagcgggtcctacgaggagggctgtcagagcctcatggagtacgcatggggtagagcagcggctgccatgctcttctgtggcttcatcatcctggtgatctgttgcatgctctccttcttcgccctctgtggaccccagatgcttgtcttcctaagagtgattggaggtctccttg

SEQ ID NO: 48874 - DNA, 386 bp, Gossypium hirsutum
  Clone ID: LIB3196-057-P1-M1-E11
gactagagcccatctctttgcttcaaagctcctgtccaggttgaattcttttcttcccttgcgttgtgttctttgctgttcaatcgccatggcttcaaagcggattttgaaagaactcatggatttgcagaaagatccacccacttcttgcagtgctggtccagtagctgaagacatgtttcattggcaagcaacaatcatgggaccctcagatagcccttatgctggaggtctgtttttagttactatccatttccctccagattatcctttcaagcctcctaaggtcgcgtttaggaccaaggtcttccatcccaacatcaacagcaatggaagcatttgtcttgatatcctcaaagaacaatggagccctgcactaaccattt

SEQ ID NO: 48875 - DNA, 401 bp, Gossypium hirsutum
  Clone ID: LIB3196-057-P1-M1-E12
atgcagcctccgcgcgagtgtgtggtgccgtgccgttagcgcgcgccgtctgtgaatcagtccgtccgtccgtccgtccgttcgtctgttcgtctgggcgccgcagctgccaccagtcccagcggtcccggcccttattgttcccgtacccggagccacccggtggagtgggctttgccgcgtcagtcatgtccatgggcctggagatcacgggcacctggctggccgtgctgggctgtatgcgcaccatcgtgtgctgctcgctgtccatgtggcgcgtgacggtcttcatcggcagcaacatgatgacgtcacagaccatgtgtgagggcctgtggttgaactgcgtggtgcagagcaccgtcctgatgcagtgcaaggtgtacgactcgctgttggca

SEQ ID NO: 48876 - DNA, 365 bp, Gossypium hirsutum
  Clone ID: LIB3196-057-P1-M1-E2
cggacgcgtggggttttccttcaaaaccctaatagctgtcctcgcctcctgaacgtgttcgaaaatggccggttctgagggattgactctacgtggcaccatgcgtgcccacaccgacatggtgacagccattgctactcccatcgataactccgacatgatcgtcacttcctcccgcgacaaatccatcatcctttggcacttaaccaaggacgaaaagacctacggtgtccctcgtcgtcgtctcaccggtcactctcacttcgtccaagacgttgtcctctcttccgattctcagttcgctctctctggttcctgggatggtgagcttcgtctctgggacttatctgccggtatctcagctc

SEQ ID NO: 48877 - DNA, 354 bp, Gossypium hirsutum
  Clone ID: LIB3196-057-P1-M1-E3
gtcaaagaacttcgatttacagaggtgtcaccagacacagatggacgggtagatatgaagctcatctatgggataacagctgcaggagagagggtcaagccagaaaaggccgtcaagtatacttaggtggttatgataaggaagaaaaggctgctcgggcttacgatctggccgctttaaaatactggggtcctacagcaaccatcaacttcccgatttcggattattcaaaagagttggaagagatgaagcatgcgaccaagcaagagtttattgcatccttgaggaggaaaagtagcggattttcaaggggtgcatcgatttacagaggtgtcacaaggcatcatcaacagg

SEQ ID NO: 48878 - DNA, 107 bp, Gossypium hirsutum
  Clone ID: LIB3196-057-P1-M1-E4
gttatttttctaataagttctaaaaaaggaaaatattgtagaaaaaaagtgttttaaaaagggggagtcacaacttgaaaataaattttttatttaggttgagtttt

SEQ ID NO: 48879 - DNA, 307 bp, Gossypium hirsutum
  Clone ID: LIB3196-057-P1-M1-E5
agaaaatagctccaacacaaaaaaaggactgaaaaaatggcggatgcgagggtgagtgttagagaggttgtcgtgtgtaacgacaggtgtggttgtccttccccttgtcccggtggcgggtcttgcaggttcatttacactccccccttctttccttcattttcaccatacatgttggattgataatgagaaaatgtctgaaaagattaggaagatataaatagaataaaaatttaactctcagaacttggtatttcgtaaaattagtgttatgctttgatagcttacatatttgccttcaaatgca

SEQ ID NO: 48880 - DNA, 409 bp, Gossypium hirsutum
  Clone ID: LIB3196-057-P1-M1-E6
atggcgctgctgcgggacaacgtcactccacgtgaaaacgagctctggacctcgctgggggactcgtggacccgccccgggctggagctgcccccggaagagggacccccatacagacccgagttcttcagcggctgggagccgccggttactgacccgcagggccgcgcttgggaagacccagttgagaaacagctacagcacgagcggaggcgccggcagcaaagcgccccccaggtcgctgtcaatgggtgagtgtccgccccagggcagggcaagggggtccaggaggggtgcttcccgggggctcccggtgttgactccgccccctttttttctgtgtttttccgtcttcctggctcttttcaggtgggtgagatggtgaaggggcgggccggggccgggagag

SEQ ID NO: 48881 - DNA, 386 bp, Gossypium hirsutum
  Clone ID: LIB3196-057-P1-M1-E7
gtttcagtctcagcagcagttttgaacttccaaaacacagtggccacctctgatttctgttttaagaagtaaatccagcaatatctcgataaatcgtcaatgaacagtatgaaatacctgtttccacttaatgactcagtcttcatagggccacacacatcagtatgcaccagttggagtttttcagaggctctccaggcttgattcgagggaaatgggagtctggcctgctttcctagctgacatacttcacatacatcatcatggtccactgagttgatgaagttttcagccaggtcttctctgaccattcgggccatcgatttgaagttggcatgtcccagtctttgatgccacagcttggattcatctgaagtggctgtgta

SEQ ID NO: 48882 - DNA, 324 bp, Gossypium hirsutum
  Clone ID: LIB3196-057-P1-M1-E8
atcccgcccgcttgctcgccgcgccgcactgccgaccgccagcatgctgccgagagtgggctgccctgcgctgccgctgccgccgccgccgctgctgccgctgctgctgcttctgctgggcgcgagtggcggcggcggcggcggggcgcacgcggaggtgctgttccgctgccctccctgcacacccgagcgcctggccgtctgcgggcccccgccggtcgcgccgccggccgcggtggccgcggtggccggaggagcccgcatgccatgcgccgagctagtccgggagccgggctgcggctgctgctcggcgtgcgcccggct

SEQ ID NO: 48883 - DNA, 403 bp, Gossypium hirsutum
  Clone ID: LIB3196-057-P1-M1-E9
atgttgggcccggcgcgatccgaaggagccaagagagcgcgggactagagtgcagagctcgggacgtggatcggagccggcacgatgggcggagagcaggaggaggagcggttcgacggcatgttgctggccatggctcagcagcacgagggcggcgtgcaggagcttgtgaacaccttcttcagcttccttcgacgcaaaacagactttttcattggaggagaagaggggatggcagagaagcttatcacccagactttcagccaccacaatcagctggcacagaagacccggcgggagaagagagcccggcatgaggccgagcggcgggagaaggcagagcgggcggccaggctggccaaagaagccaagtcagagacctcatggccccagatcaaggagc

SEQ ID NO: 48884 - DNA, 392 bp, Gossypium hirsutum
  Clone ID: LIB3196-057-P1-M1-F1
cccacgcgtccgacgagctgaagccgtgctacaataacactagtgttttcaacaataaattaatcatagccgcagcttgtttcttttaaactctaaatataaaggaggccaaacatgccgcctcgtagataccaatttgggagggctgatgaggccactcatcccgactccatgagagccaccttggctgaattcctctccactatcattttcgtctttgccggcgaaggctcaattcttgctcttgacaagatgtacaaggatacgagtgcgacgcctgcaagactggtgatgatagcacttgcgcatgggttgtctctgtttgcagctgtggcatccagtgtaaacgtatctggtggccatgtgaatccagcagtcaccttcggtgcctt

SEQ ID NO: 48885 - DNA, 385 bp, Gossypium hirsutum
  Clone ID: LIB3196-057-P1-M1-F10
atgtcatactctcgtccgactcccgtataatggccaaccgttacaccatggatctgactggcatctacgagagcctcctgtcgatgatccctgacgctcctgggccatccgaccatggaaggactgagttcagcccaggctggggctcctaaagactatgcatcctgagtccctgcgactgcagcacgtacggtgtcacctcccgtcttgctggccgctccaccattctagttgaaggccgcagctgaggctgggttcccccaccgccctgattaggaccgctggctccccgcctgagccccatgctgtaaccgttacccacttcgtccactagaacctccaccaccctgtagggctacaagactgaactatgtccgaccttctc

SEQ ID NO: 48886 - DNA, 404 bp, Gossypium hirsutum
  Clone ID: LIB3196-057-P1-M1-F11
atggaagcccggcagccctttgcaaaggcaccccttgtcttaaaatcactatgtgggaaagctgtagatacttttatatatttgtattggactctgaggaggtgaaacctgtatatattttgcattcgtgctgactttgttatcccaggagatccatgcgatgatcccttgctgtcttccgtgtaaagattgcacagttgtacttgaatctggcatgtgttgacgaaactggtaccccagcagatcaaaggtggaaaatatgtcagcagtggggctaaaaccaagcagttagaagccctatagctgcctttggccaggaagcaaggatggcatgggcacccgccggctccctgggtccctggtattcgctgtgcatgcgtttgccctctgccctggctgtgtga

SEQ ID NO: 48887 - DNA, 389 bp, Gossypium hirsutum
  Clone ID: LIB3196-057-P1-M1-F12
cggacgcgtgggaaagtttctctctctctctctctctctctattgttgaagttcataagcttttgtatcaatggctgaagtccgtgaccgcaacctgcctcaccaagttcaagttcacccacagtaccgtttcgacaatacaaccggaggcggttacggtgcaaagaactatcacagtggaccatcaacaagccaagttctagccgtccttacacttctccccattggtggtacactgcttgcattagccgggttaacactggccggcaccgtcattgggctgatgctagccacaccgctgttcatcatcttcagcccagttcttgtcccagctgccattgccattgccatggcagtgacggggttcttgtcgtcggaggcgtttgggt

SEQ ID NO: 48888 - DNA, 408 bp, Gossypium hirsutum
  Clone ID: LIB3196-057-P1-M1-F2
atgaacaactcaaccttctctgcacagtgggtgagtctccccattgggaacatcttaatattctcctatcgattctttgttttgatggagacctctttgctatgcaataaatatatttattttaaaggcaataataacttttgtttaaggtgaccttataaggtcatattttgactttccactcagatcacagctgtggaacttgggatcagaaaaggggagtgatttctgtaaaggctcgttaggttagcaagacaatctacccacttcaagagtactctcctgtcaacatgtattggaaatttttaatttagagggcattacattggcaattttgatgatcaaaaggtaagtttttctttattccacggatgtataatccatcagaaaacatatacttgactaaaa

SEQ ID NO: 48889 - DNA, 404 bp, Gossypium hirsutum
  Clone ID: LIB3196-057-P1-M1-F3
atcgcagggcggcctggcggaattcaaccccttctcagagacaaatgcagcgacaacagttcctgtcacacaactccctgggtcctcgcagccagcggttctccagccatcagtggaaccaacccagccgaccccccaggctgcggtgtctgcagcccaggcaggcctgcttcggcagcaggaagaactggacaggaaagctgctgagctggaacgcaaggagcgggagctgcagaacactgtagccaacttgcatgtgagagagaactggccccccctgccctcgtggtgccctgtgaagccctgcttctatcaggatttctccacagagatccctgccgactaccagcggatatgcaagatgctctactatctgtggatgttgcattcagtgactctgtttc

SEQ ID NO: 48890 - DNA, 390 bp, Gossypium hirsutum
  Clone ID: LIB3196-057-P1-M1-F4
cccacgcgtccgcggccgaggaggacagcggggagttttacctccgctactacgtgggccacaaagggaaattcgggcacgagtttttggagttcgagttcaggccagatgggaagctccggtacgctaacaactccaactacaaaaacgacactatgatccgcaaagaggtcttcctcactcctgccgttcttaaggaatgccgccgcatcatcgccgagagcgagataatgaaggaagatgataacaattggccagaaccagaccgtgttgggcggcaagagcttgagatagtgatggggaatgagcacatctctttcacaacttcaaagattgggtcccttgttgatgttcagagcagtaaggatcctgaaggtcttcgcatatttt

SEQ ID NO: 48891 - DNA, 409 bp, Gossypium hirsutum
  Clone ID: LIB3196-057-P1-M1-F6
atgcagtatattcatatgtaggctacaataaaatgtatatcttcggtattattgatttctattaaagaagcagttgatcatagagaattttctgcaaatttatcaacatgatataagtaacacttctaactgtttagacctgtcaaggcttaagtaaaacaattttttctatttctaactcgtatatctattttcacagggtgatagagttgtattgtttagccaatttaccatgatgctggatatcttagaggttctgttaaaacatcatcagcataggtacctcagattagatggaaagactcagatttctgaaaggttggtatacttcatgttccaaaaaaaaaaccactcatttgttgttgttgttagaattttaaatgtctagagtacttgatagaattttgtt

SEQ ID NO: 48892 - DNA, 304 bp, Gossypium hirsutum
  Clone ID: LIB3196-057-P1-M1-F7
ctttatttttcactttccacacacttaacttaattaagcaagctcgtaagctgttttcatcaatggccgaccgtgaccgctcttaccgatttgaccaggttgttcgtggtgatagaacgaactatcaaagcggaccatcaacaacccaagttctaaccgtcctcaccctccttcccatcggcggcactctccttgcattagccgggctaaccctcaccggcaccgtcatcggcctatgcgtggcaacgccactcttcgtcatcttcagaccggttctgctcccagctgccatcgcggttttcat

SEQ ID NO: 48893 - DNA, 387 bp, Gossypium hirsutum
  Clone ID: LIB3196-057-P1-M1-F8
cttctatcaagcaatgcattgttggctctcggttctgactggcccgttacaagtacttatcctttgcgtgctataagaacagcaatgaatagaattcctcctggttgggacactgcttggataccatccgagcgcctttcgctaaatgatgcattaatcgcgcacacgatttcagctgctcgggcatgctttcgggagaacgaaataggatcattattaactggaaaattggctgatttcgtcatactatcatctgattcatgggatgagtttgccacatgaggatctacatcagttaatgcaacatatgttggtggtatccaagcctatccctgaaagcttttgattttaaaactggcttaactgttttcagacagttcactagtt

SEQ ID NO: 48894 - DNA, 393 bp, Gossypium hirsutum
  Clone ID: LIB3196-057-P1-M1-F9
atgccatcaccccgtctgtcacccgcaccagcttcacctctgtgtcccggtctgggggtggcggtggtggctttggcagggtcagccttgggggtgcttgtggagtgggtggctatggcagccggagcctctacaatctggggggctccaaaaggatatccatcagcactagtggtggcagcttcaggaaccgatttggtgctggtgctggaggcggctatggctttggaggtggtgccggtagtggatttggtttcggcggtggagctggtggtggctttgggctcggtgccagagctggctttggaggtggcttcggaggccctggctttcctgtctgcccccctggaggcatccaagaggtcaccgtcaaccagagtcttctgactcccc

SEQ ID NO: 48895 - DNA, 408 bp, Gossypium hirsutum
  Clone ID: LIB3196-057-P1-M1-G1
atcccggccaggcacccctgcaacatggcctggaacaccaacctccgctggcggctgccgctcacctgcctactcctgcaggtagctatggtgattctcttcggggtgttcgtgcgctacgacttcgatgccgacgcccactggtggacagagaggaagcacaagaacttgagcgaggtggagaacgaattctactatcgctacccgagcttccaggacgtgcacgtgatggtcttcgtgggcttcggcttcctcatgaccttcctgcagcgctacggcttcagcgctgtcggcttcaacttcctgctggcggccttcggcatccaatgggcgctgctcatgcagggctggttccacttcttagaaggccgctacatcgtcgtgggagtggagaatctcatcaacgct

SEQ ID NO: 48896 - DNA, 378 bp, Gossypium hirsutum
  Clone ID: LIB3196-057-P1-M1-G10
aagcttttatctttaaaaaaaccctaaaatttttgagatgttctctcaacctccagcctaatgtctaatgtccaggcctccaattgcccgcttgtaaccggcgaagcaaggccctccaacggtgcgggcacgatgcccggtaagcctcttctcctctctccaatccttcgtatgtgttgtggatccaaatggaaaaaggaaaaaaaaaggaaaaatagaacaaaattacaataaataatcaccttagaaatattcttggttgcctctcttctgatttttgtgtgtattttcttttattattttgcccaaaaaaaacccctttacagtgaaaaaatcgaaggctttatagccaaaagacaagcaggttttgcctatttc

SEQ ID NO: 48897 - DNA, 405 bp, Gossypium hirsutum
  Clone ID: LIB3196-057-P1-M1-G11
atgcgactggtaccagaggcagcggcccagtgagatcaaagactacagtccctacttcaagaccatcgaggacctgaggaacaagatcattgcagccaccattgagaatgcgcagcccattttgcagattgacaatgccaggctggcagccgatgacttcaggacaaagtacgagcatgaactggccctgcggcagaccgtggaggccgatgtcaatggcctgcgccgggtgttggatgagctgaccctggccaggaccgacctggagatgcagatcgaaggcctgaaggaggagctggcctacctgaggaagaaccatgaggaggagatgcttgctcttcgaggtcagagcggtggagatgtgaacgtggagatggatgccgcacctggcgtggacctgagccg

SEQ ID NO: 48898 - DNA, 403 bp, Gossypium hirsutum
  Clone ID: LIB3196-057-P1-M1-G12
atgcagtttgggacttacgaagtagtctgttggatagtttagttctcaagattctcaaggctaagtagaaccagatccaagcattagtgatttgaggatgatccttggcgtttgtaaacaactttatgagattgctttcctagtttcctcccactccataatctctccactacttcctggttccctgggctccctttcttggttggtcctctggccagaaacttggggatctagttactctactctgttgctatttcatacctttatgactgggcctgcattctgacccatgtggagggggtacagagagaaaaaaaagcaacagggttgctgtacccttttaaaaccataactcgaccaaacagaaatattcccctccctcaaagttttagttcctgtgggc

SEQ ID NO: 48899 - DNA, 390 bp, Gossypium hirsutum
  Clone ID: LIB3196-057-P1-M1-G2
cggacgcgtgggcgaagaagaagaacaagaacaagaagaggaaaggagaagtggacaatacaggaaaataaggtcccggttgtcgcgtggagacatatttgtagtcccagcaaactttccagttacattcgttgcatcccaaaaccagaacctgaggatgactgggttcggtctttacaaccagaacattaacccagaccataaccagaggatcttcgtggctgggaaaatcaaccatgtgagacaatgggatagccaagccaaggagttggcctttggggtgtcatcgaggttggtggatgagatattcaacagcaacccacaagagtcttacttcgtgtctcgacagaggcagcgtgcatctgaataagagttaaaggcaataataat

SEQ ID NO: 48900 - DNA, 384 bp, Gossypium hirsutum
  Clone ID: LIB3196-057-P1-M1-G3
gttgaatgctaataatttggaaacaacccccgaaatgggtgagaacgctgacccattttttgctgatcgtgatgactatattgatactgctgaatatgagatgctgttcggacagtttgctgagaatgagaatgcatttattgggaagcctccggcttcgaaatctgtagttgagaatcttccttgtgtggtcgtgactcaggaggatgttgtgaataacaatgcgctttgtgcggtttgtaaggatgaggttaaccttggtgaaaagatgaagcagctgccatgtgctcatcgctatcatggagattgtattataccttggctgggaataaggaatacctgccctgtttctcgtcatgagttgccaacagatgatgctgacta

SEQ ID NO: 48901 - DNA, 411 bp, Gossypium hirsutum
  Clone ID: LIB3196-057-P1-M1-G4
atccaggacccaaggaaccaaaattgcatctgatggtctcaagggtcgtgtgtttgaagtgagtcttgctgatttgcagaatgatgaagttgcatttagaaaattcaagctgattactgaagatgttcagggcaaaaactgcctgactaacttccatggcatggatcttacccgtgacaaaatgtgttccatggtcaaaaagtggcagacaatgattgaagctcatgttgatgtcaagactaccgatggttacttgcttcgtctgttctgtgttggttttactaaaaaacgcaacaatcagatacggaagacctcttatgctcagcaccaacaggtccgccaaatccggaagaagatgatggaaatcatgacccgagaggtgcagacaaatgacttgaaagaagtggtcaa

SEQ ID NO: 48902 - DNA, 410 bp, Gossypium hirsutum
  Clone ID: LIB3196-057-P1-M1-G5
atgggaataccaaaccgtaacaggaatgtgtgatttgttccaatgccaccagtctggaactctatactgatcctcaaggagactgagatatgtggttggtacttgggggaccagagtaaagaactgacacaatccctgtccctggtagggagctcccagcatccttgaggagcaaagacaagcataaaagaaatcatttggaagtgatataaatgaccaggcttcatgatgaccgaaagttgaaagttgggattaggttgggagaagtgccctcaggtccccctggagctcttcttgcattgcgtgaccctcagtttatcctatgcctgtttcatagctgtggaacttttgggaggagggggaaccttttgccttcaggaccactgaataccaggaccaatactgctttc

SEQ ID NO: 48903 - DNA, 411 bp, Gossypium hirsutum
  Clone ID: LIB3196-057-P1-M1-G6
atctagttcatacccttgctgaactaaagatgactggaaactgtttgaaaggttctcggccccttttgtcttttgaccctgtaagtttctcattcagtgtatgaggtctaattttcttatctggcgtggttgtttttagtagatatagttgtgtaattcaatttagtttcaccctcaccttgattttatggattatcaattatttcaggcacatttataatgaggttatagaaacaaatgagcaaacagttttaaacaaggcaatctactgttaaataatatgcttcctttatttttataggcttttgatgaattaccacattatgctttgttaaaagaactcttaattcaggtaaatatcttttagctatccaaaatatacatgatatgtcttggaataaggaactaaca

SEQ ID NO: 48904 - DNA, 388 bp, Gossypium hirsutum
  Clone ID: LIB3196-057-P1-M1-G7
cacgaatgctcttcgaaacttagtccggatacatcactagcacgaatgctcttcgagacttagcccggatacatcactagcacgaatgctcttcgggacttagcccggttatcatccaaatattcatgcacataccaataaatcatgacacatctatatttcattttcataattagagttcaaacacaagtcacatattaagcaatcccattttcggctcactagccacatacaaacagcatggtttagtttgctttatgacacaatctctatgcacatacggctacccgtcatacgtatagactaattaactcaacatataattcaagtagaatcatcatatcaccgtatatttgttatgctcatacgtcatgacttaatcaaatcg

SEQ ID NO: 48905 - DNA, 405 bp, Gossypium hirsutum
  Clone ID: LIB3196-057-P1-M1-G8
atccttcctgagcaccttcctttctttcagccaactgctcgctcgctcacctccctcctcggcaccatgaccacctgcagtcgccagttcacctcctccagctccatgaagggctcctgcggcatcgggggcggctccagccgcatctcctccgtcctggccggagggtcctgccgcgcccccagcacctacggcgggggcctgtctgtctcctcctcccgcttctcctctgggggagcctgcgggctggggggcggctatggcggtggcttcagcagcagcagcagctttggtagtggcttcgggggaggatatggtgctggcttcggtgctggcttgggtgctggcttgggtggcggctttggtggtggctttgctggtggtgatgggcttctggtgggcagg

SEQ ID NO: 48906 - DNA, 383 bp, Gossypium hirsutum
  Clone ID: LIB3196-057-P1-M1-G9
cggacgcgtgggctggtggggacttccgtgctgacatccatgacatcatgcttacaattgtcaacttcttgagtcttagttctgcacccttcactgtgaacatctatccttttataagcctctattctgatcccaacttcccagttgagtacgcattctttgatggcaatgcatcgccagtaagtgatggtgggacattatattacaatatgtttgacgctaaccttgatacccttgcacatgcattacaaaaaaatggatttgcagatttgcccattatagttggtgagattgggtggcccactgatggagaccgaaatgctaacacagagtatgctcggcggttcaatcaaggttttatgtctcatatttcaggtgggaga

SEQ ID NO: 48907 - DNA, 388 bp, Gossypium hirsutum
  Clone ID: LIB3196-057-P1-M1-H1
aatttggatattttatttggccaccacattctttttttgcggtacatgttgacatttctgtcatcacaatctttccactgtcattttcttgttcttgtcgctattggccactgccaaaccgccactaaccacaactgttagccgccgctattagcctctattgtcaacccttgccatcgaatgtcataatcagaccacaaaaaacatattttcaatttggctaggtcgagtttgtgttgtcttagtctaccttgatgtgtctcggttcttctggttccattgaaaatataggttacaaaaatcctatgtccatttttgattgacatattttattcttaaaataataaaaccctaggtagagatgatagtccaaaatctaagttatata

SEQ ID NO: 48908 - DNA, 405 bp, Gossypium hirsutum
  unsure (1)..(405): unsure at all n locations; Clone ID: LIB3196-057-P1-M1-H10
atgagcaatccaccgtgccccagcacctgcatcatacacctgcatcatacctgctctaaagcacttaccaagttgtattgcaatggtttgtctacacagttagttttccctagaacgacttattcaaggccaggggctatgtcttactcatttttttaatgtccccagggattagctagttcttgggaaacaactgggactcaaaatagtttgccaagtgaatgattgagaggtccaatcaagctactacttcccttcagtgctgcacagtgcagcaaataaccagctcagatatgggttcaaagaccacaggtttctccttggacagctcagctctcctcataactccatagtatggagtggttgcatctggaagagggggnagagttccaaatactaagtaat

SEQ ID NO: 48909 - DNA, 392 bp, Gossypium hirsutum
  Clone ID: LIB3196-057-P1-M1-H11
tataaaactaagtaggtgccgactgctccgttctttgtagcaaagcaaagttttgtgaagcatggccgtcgggaagaacaagaggatttccaagggaaagaagggaggaaagaagaaggcagcggatccttttgctaagaaggattggtacgatatcaaggctccttcagttttcactaccagaaatgtggggaaaactctcgtcacccgtactcagggtaccaagattgcttctgaaggactcaaacaccgtgtgtttgaggtttccctggctgatcttcaaggtggtgatgaggatcatgcttacagaaagattcgtttgagagctgaagatgttcaaggaaaaaatgttttgaccaacttctggggaatgaattttacaactgacaaac

SEQ ID NO: 48910 - DNA, 393 bp, Gossypium hirsutum
  Clone ID: LIB3196-057-P1-M1-H12
gtggtttgtcgggaaagctcaaaaaaaatctgaaagggaggctgaactgaaacatcgatttgagcagacaatgaaagaggcagcagataaatttcaaggagcaaacttgtatgtcaagaatttggatgatagcataagtgacgaaaagctcaaagagctattctctcaatatggtaccataacatcatgcaaggttatgcgggaccctagtggaataagtaaaggatcagggtttgttgcgttttcgaccccagaagaagcttctagagctcttgcagagatgaatggcaaaatggttgtcaacaaacctctctatgttgcacaagctcaaaggaaggaagataggagagccaggttgcaggctcagttttctcaaatgcgaccacttacaat

SEQ ID NO: 48911 - DNA, 201 bp, Gossypium hirsutum
  Clone ID: LIB3196-057-P1-M1-H3
cccacgcgtccagtttttttttttttttttttttttttttttttttttttttttttttttttttttttttttttttttttttttttttttttttttttttttttttttttttatatttatttttattttttattttttattttttttacttcgggaaataaaaaaaaaacccttatatatttgactataatcatatttaaa

SEQ ID NO: 48912 - DNA, 413 bp, Gossypium hirsutum
  Clone ID: LIB3196-057-P1-M1-H4
atgcctccctgaacagggaggcgagcaggcaggaaaggaagccaccctgaacaggggagaaaacttaacctctcttctcctctccaaacctttcaccttgagtgggcaatgtttggtgggggctgttccttcttggagatgccttgagtcagaccattttgagatcatggaggaaggatgaagaagtgaaaatgacaataatgactctcaagaggctggtgatgtgacatggcaaatgtagaactgacttaaattgaacaaaccctcactgagcacctctgatgttgagcacctgctgaatactgagcactgaatgggggagggggaggggagcacaggggtgagtcaacctgggacttggtctcagggacatgcctaccaatagtgggtatcgtaaggcatgtacccaaaca

SEQ ID NO: 48913 - DNA, 400 bp, Gossypium hirsutum
  Clone ID: LIB3196-057-P1-M1-H5
atagccccttcaccacccccacctcctccacccccacaacctgccccagagcagcagaccatgcccccaccaagctccccttctggtggggcagggagtcctggaggcctgggtcttgagagcctatcaccggagttttttacctcagtggtgcagggtgtgctgagctccctgctgggctccttgggggctcgggctggcagcagtgaaagtattgctgccttcatacaacgcctgagtggatccagcaacatctttgtgcctggagctgatggggcccttggattctttggggccctgctctctcttctgtgccagaacttctctatggtggacgtagtgatgcttctccatgggcattttcagccactacaacggctgcaaccccagctgcgatcct

SEQ ID NO: 48914 - DNA, 341 bp, Gossypium hirsutum
  Clone ID: LIB3196-057-P1-M1-H6
atatgctgaactacctcatcgagtgtttcgaccgagttggaatagaggaaaaaaaagcaccaaagatgtgcagccagccagcagtcagccagcttctgagcaacatccgctcacagtgcatatcccatactgctttagtactacaaggctccctaacacagcccaggtatgaagacccgtgacgtgcttgacattagctggcagaaggccctagccatcagcggacatcaggctctccggccattcttgcaccaccttggataactcccttcctcacctgtaaaatgaagatccctttccttctctaaaataccatgaaaataaacgctccttttttcctc

SEQ ID NO: 48915 - DNA, 403 bp, Gossypium hirsutum
  Clone ID: LIB3196-057-P1-M1-H7
atctctcatagtggcttccatttaacacaggcaaagccctttaccttagcaaattctttatctttcaaaagtgaccaaaatgaggacttcaaccttggttgctcctcaatagagatgctgatcttgagttgtaatgagaaaagtggacatatagattttagtgactgcagtcagctctctggcattcctttctcagtttgcatctaaaagactacaatatgtcaagcttatctccacctgaatttgctgcctactataaaaacatttcattaatatatctcattcttcctacctccatctctggtttgtcattagtggtattctgaaaagcttaagaaaaaagaatcattgagtagaaagtgaacattttaagttattttcctttttcactggcaattagtta

SEQ ID NO: 48916 - DNA, 372 bp, Gossypium hirsutum
  Clone ID: LIB3196-057-P1-M1-H8
gtgaaatcctcctttctgggtttatgataaactctactctgaggcgcaggacccatcttgttcaatctttctctgttgttttcctttactggttctacgttttttcatgaactctctctctctctctctctctctctctctctctctctctgattgtaaccccatagcccgctcttattttcttcagcttttcttcaccatttttcataaataattccatatctgagtttctttgcataataaaatttctgggttctgaggccagttattggttcttctgttttttttgctataattggtgttggtacttatggctacttcaagcagtggagcatcctcaggttcaagcacgctgagaagctcgagttcatc

SEQ ID NO: 48917 - DNA, 401 bp, Gossypium hirsutum
  Clone ID: LIB3196-057-P1-M1-H9
atggcggtagcggctgtgttgctcgtttctctgagccatccagtgccattctcgttggtgcagcgacacacgcgctcgccggcgccatgactgatcagatgacccttcgtggcaccctcaagggccacatcggctgggtaacccagatcgctactaccccgcagttcccggacatgatcctgtccgcctctcgagataagaccatgatcatgtggaaactgaccagggatgagaccaactatggaattccacagcgtgctctgcggggtcactcccactttgttagtgatgtggctatgtcctcagatggccagtttgccctctcatgctcctgggatggaaccctgcgcctctgggatctcacaacgggcaccaccacgaggcgatttgtgggccatacc

SEQ ID NO: 48918 - DNA, 385 bp, Gossypium hirsutum
  Clone ID: LIB3196-058-P1-M1-A1
agcgtgttaaggccaagaaggagaagcttgacaagaagaggaagcctatatctaaggaggaagcaaccgcaatcaagtcagctggcaaagcatggtatcaaactatgatctccgacagcgattacacagagttcgagaacttctccaagtggttgggtgtgtcgcagtaaattttagtttctgcggagtggttgtatcagttttgttttcggtgtttttgacatttttatttcatttgatgatgtttggagttttggaagtaaaattagtggaatggcatggaccctatttctcttttcatttagccatctccaccatgttttcactctttatgattaggggaatagtttcaatgaaaatgagaactagcattgaaatagtttac

SEQ ID NO: 48919 - DNA, 336 bp, Gossypium hirsutum
  Clone ID: LIB3196-058-P1-M1-A10
ctcctttgtcacttggtattgagacactaggtggaatattcactaggctaatcaaccggaacacaaccattccaacaaagaaaagtcaggtgttctctactgcagctgataaccagactcaagtaggtatcaaggtgcttcaaggtgagcgtgaaatggctgctgacaacaagcttttgggtgagttcgacttggtaggcattccccctgctcctagaggtatgcctcagattgaggttacatttgacattgatgccaatggtattgtcactgtttcggccaaagataaagccactggtgaagaacagcaaattacgatacgttcctttggtgggc

SEQ ID NO: 48920 - DNA, 366 bp, Gossypium hirsutum
  Clone ID: LIB3196-058-P1-M1-A11
agaaaatccgaaagccctacaccataaccaagtccagagagagttggactgaacctgaacacgacaagttcctcgaggctctccagctatttgaccgtgactggaaaaagatcgaagcatttgtcgggtcaaagactgttattcagattcgtagtcatgcccagaaatattttctaaaggttcagaagaatggaacaaatgaacatctacctccacctcgacctaaaaggaaagcagctcatccatatccgcagaaagcctcaaaaaatgttcatgtacagccacaagcatcagggtctcttcaatcatcaaatgcattaattgacactggatgtgttctgagatctgatccctcattgatgctta

SEQ ID NO: 48921 - DNA, 190 bp, Gossypium hirsutum
  Clone ID: LIB3196-058-P1-M1-A12
ataaccatgaaaaccacaaaagcttcagtgtttcttcttttcatcatcttctcagtcacaccatcatcctttttgtttggtgtggccaacgctacaaatgaacctgtgctcgacactgatggcaacgaagtccaaacaggcaccgaatactacgttgtgtcggcgatatggggtgctggtggtggtgggc

SEQ ID NO: 48922 - DNA, 367 bp, Gossypium hirsutum
  Clone ID: LIB3196-058-P1-M1-A2
gttctccgccgtctaatctgaaccgagtgatccctactactactctacctgcatggccgccatcccctccaccgcctccgccgcaagtaaccgttgaagaaacgaaaacaagcagtccccagaaccagaaccagaacccagccatcaacgacggcgcgggtatctcatccggttcaccggagaccgatttatctccgccgcttttaaaagctctactcgactgtgctacactcgctgactcggaacctgaacgcgcgattaaatcactggctaaactcaaggaatcggtatcagaacacggagatccaactgaaagagtggctttttacttcactgaagctctccatagcagactctctcatcaaac

SEQ ID NO: 48923 - DNA, 379 bp, Gossypium hirsutum
  Clone ID: LIB3196-058-P1-M1-A3
cacaggtttcccatgccgtcggtaaggactcgaggattggaccaaagttcttgaatgctagtgttgggtttggtggatcttgttttcaaaaggatatattgaatttagtatatatatgtgaatgcaatggattagccgaagttgcaaattattggaaacaagtgattaaagtgaatgattatcaaaagaatcgatttgtaaatagggtggtctcgtcgatgttcaacacggtttccggcaagaaaattggtataatgggatttgcattcaagaaagatacgggtgatacacgggagactccggctattgacgtatgtaaaggcttgttgggggataaggctcggttgagtatttacgatccgcaggtgactgcggatca

SEQ ID NO: 48924 - DNA, 140 bp, Gossypium hirsutum
  Clone ID: LIB3196-058-P1-M1-A5
cggcaataaaactccaccgtttcagaacatcctagagagccgagctttcttcgcttgttggaacatattttttaggcttacatcgactgcggggtaagaatgggtgcctttgtttgacagatcgactgcttatttctctt

SEQ ID NO: 48925 - DNA, 379 bp, Gossypium hirsutum
  Clone ID: LIB3196-058-P1-M1-A7
gcaaaaccctccttgcagacgtcttctgcttcttcctccaaacaatctccaaggaaacgaaaatggctgcctcttccgcttttctttctacttttatttctccccaaacggtctccttctcacccaaatcctcctcttctcttcgcctccttcctccaactagcgtgcgcatggtacgaactgtgaccctagccaccgcttcacagcccgccaccagcccccggacgccacgcggcatcatgaagccgcgtcgtgtaacgcctgagatgcaggatgtcgtcggagtccctgaaattccccgaactcaagcccttaagcagatttgggcttacattaaagagcacaatcttcaggaccctgaaaacaagaagattataaa

SEQ ID NO: 48926 - DNA, 358 bp, Gossypium hirsutum
  Clone ID: LIB3196-058-P1-M1-A8
cggacgcgtgggcgcacacttagcttaactaagcaagctcgtaagctgtgttcatcaatggccgaccgtgaccgctcttaccggacgtttgaccaggttgttcgtggtgatagaacgaactatcaaagcggaccatcaacaacccaagttctaactgtactcaccctacttgccataggcggcactctccttgcattagccgggctaaccctcaccggcaccgtcatcggcctatgcatggcaacgccactcttcgtcatcttcagcccggttctggtcccagctgccatcgcggtcttcatggctgtggccggtttcttgtcgtccggagcattcgggttgacggggctgttctcgc

SEQ ID NO: 48927 - DNA, 390 bp, Gossypium hirsutum
  unsure (1)..(390): unsure at all n locations; Clone ID: LIB3196-058-P1-M1-A9
atgcgcttcctccagcttggcgccaaggtcccaaagggcgcactgctgctcggtccccccggctgtgggaagacgctgctggccaaggcggtggccacggaggctcaggtgcccttcctggcgatggccggcccagagttcgtggaggtcattggaggcctcggcgctgcccgcgtgcgaagcctcttcaaggaagcccgagcccgggccccctgcatcgtctacatcgatgagattgacgcggtgggcaagaagcgctccaccaccatgtccggcttctccaacacggaggaggagcagacgctcaaccagcttctggtagaaatggacggaatgggcaccacagaccatgtcatcgtnctggcgtncacgaaccgagctgacattttg

SEQ ID NO: 48928 - DNA, 383 bp, Gossypium hirsutum
  Clone ID: LIB3196-058-P1-M1-B1
acttcctgccatacaaggcctcataaggtgccatcttcaaactcgtctgaaaactgttgttgtaggcaaattctactaccggcaaatatttttcccagctaccctgaaattcaaggatgcaacatcgcaacatgtcctcaagaatctgaatcattagcccagactgaccatctgtctgagggtgaaaagctgtactaaagcttaacttcgtacccaaggcttcttgtaatttatttcagaatctcaaagtgaaccttaggtctctgtcggaagtaatcgatagtggtaccccatgcaatcttacaatctcagaaatgtacaagtcggccaatctatcgagggagtaatctattctcaccggaataaaatgagccgacttcgtc

SEQ ID NO: 48929 - DNA, 368 bp, Gossypium hirsutum
  Clone ID: LIB3196-058-P1-M1-B10
ggcatgccccacaaattctaccatggccggactggtcgtgtttggaaccgtaccaaacgccccattcgcgttgggggcaacaaggcagtgggttacccggttattaaggagagggttcatggtaaagtggagcctggtcaggctttaaggggcacttgggaattcaaactgaggaagataaagaatgatcagctcaaggcagaggccaaggcaaagggtgaggtgattagcacaaagaggcagcctgagggcccaaaacctggtttcatggtcgagggtgcaatgttggaaacggttactcccattccatatgatgttgttaatgatctcaaagggggctactagatctactctgtgttttgggttat

SEQ ID NO: 48930 - DNA, 370 bp, Gossypium hirsutum
  Clone ID: LIB3196-058-P1-M1-B11
atcccaatacgaggagattgctcagaggagccgggctgaggccgagtcctggtaccagaccaagtacgaggagctgcagatcacagcgggcagacatggggacgacctgcgcaacaccaagcaggagattgctgagatcaaccgcatgatccagaggctgagatctgagatcgaccacgtcaagaagcagtgtgccagcctgcaggccgccattgctgatgctgagcagcgtggggaaatggcactcaaggatgccaagaacaagctggaagggctggaggatgccctgcagaaagccaagcaggacctggcccggctgctgaaagagtaccaggagttgatgaacgtgaagctggccctggacgtggag

SEQ ID NO: 48931 - DNA, 388 bp, Gossypium hirsutum
  Clone ID: LIB3196-058-P1-M1-B12
attggtcctatacttcatagggaatttcataccttgcaaacatattttcaaaggcattatcttagttacacagcagcccaaggcagtaagctgagcacgttcaatatcttcattttatagaggttctgttgaaaactgagaatcggcgtttaattggtaaggtcacatatctataaaccttctgtgtagcaaaagaagcaagaccttcagttaagtgccatgtcacctataggtatctgaaaagtccaacaataaaacttataattaaaaaaaccctcaaataccttatctgtaaacacacaaataaaatcatacagcaattttaaaaggagataaaatgtatttcttatcataataaaagaaattggggttgttgacacacatcatt

SEQ ID NO: 48932 - DNA, 349 bp, Gossypium hirsutum
  Clone ID: LIB3196-058-P1-M1-B2
gcttttagttgcctcgatttcaagtgaatcagaatgggtaaggaaaagactcacattaacattgtggtcatcggccacgtcgattctgggaaatcaaccaccactggccacctgatttacaagcttggtggtattgacaagcgtgtgattgaaaggttcgagaaagaagctgctgagatgaacaagaggtcattcaagtatgcttgggtgcttgacaagctcaaagctgagcgtgagcgtggtatcaccattgatattgccttgtggaaatttgagaccaccaaatactactgcactgtgattgatgcacctggacaccgtgactttatcaagaatatgattactggta

SEQ ID NO: 48933 - DNA, 249 bp, Gossypium hirsutum
  Clone ID: LIB3196-058-P1-M1-B3
atgctcccccctccccccgagcgccgctccggctgcaccgcgctcgctccgagtttcgggctcctgctaagctagcgccgccgtcgtctcccttcaatcgccgtcatgattatctaccgggacctcatcagccacgatgagatgttctccgacatctacaagatccgggagatcgcggaccggctgtgcctggaggtggaggggaagatagtcaataagacacaaggtgacattgatgactcgctcatt

SEQ ID NO: 48934 - DNA, 169 bp, Gossypium hirsutum
  Clone ID: LIB3196-058-P1-M1-B4
atgggagaaaggcaccctaataagctttgccggtttaggaaaaactaggccatttgtggtgggtggttaaaggtgggaccttgaaccggacttcaaccagcaatggccttgggggccgcccttatattgggggcttttgcaggctttttttaattaaaacaattggggg

SEQ ID NO: 48935 - DNA, 382 bp, Gossypium hirsutum
  Clone ID: LIB3196-058-P1-M1-B5
accctgtaggaccagaaaggccagctagagtcaccgctgccgccgttcccgaattgagaatgaatttgtgactctgaagaaggacgtggatgctgcctacatgcacaacgttgaactggacgacaacgcagacactctcacaaacgagatcaatcttctgggagacttgtatgacaccaaagctgtcccagatgcagacccacatctcagacacatacgtggtgctgtgcatggacaacaaccgcaacctggacctggacagcatcatcgctgaagtcaaggcccaataccaggagattgctcagaggagccgggctgaggccgagtcctggtaccagaccaagtacgaggagctgcagatcacagcgggcagacatgggga

SEQ ID NO: 48936 - DNA, 373 bp, Gossypium hirsutum
  Clone ID: LIB3196-058-P1-M1-B7
gtaaatccgaagctaaaactgagctccaaaatcgcatgggaggtttagctttctgttttttttcctgggaaatccatttggacttcaattgagctttcaattacccgttgaactctaactatcgctacagcgtcctttcatggcttctcttgtttcaatttttgttctgctttttacctgttcgttctccaatttctcagccgaaagccggaaggagttgaaggacaaggaggatattcatttgagacatttggttcaatccaatgtaattgacccttcacgagtgatgcaactttcatggcggccaagggtctttcaatatagtggctttctaatggacgaggagtgcgacctccttatttctttgggccat

SEQ ID NO: 48937 - DNA, 202 bp, Gossypium hirsutum
  Clone ID: LIB3196-058-P1-M1-B8
atcggcctcccaaagtgctgggattacaagtttattcctactgttttagctcagttcgtatgtatgaggtcatttagtcttcaggttagcatttgagtgagactaggtttattttcaaaacctgtaagagaatggagtggggtattaagaaagaccggtcctaatgactgcaattggaaaggcccttaaggcaaaaattcca

SEQ ID NO: 48938 - DNA, 375 bp, Gossypium hirsutum
  unsure (1)..(375): unsure at all n locations; Clone ID: LIB3196-058-P1-M1-B9
tatatgggatatggcatcgacatcgataagtgatcccatataataccacgtctgggacatggcatcgacatcagtatgagatcccatgtaaaaccatatctggaatatggcattggcatcgatatgaggtcccgtataagaccatgtctaggacatggcatcggcaccgttatgagatttcgtgaaagaccatagcagggctattggctttgatatgagattacatgtaagaccatatccgggatatggcattgtatgatatatgcatgttttccaagtatcctttagtatttcaagtggttaaatgggtaacccaatgagtatgtcaaatatgagaaagagtatgtaagtactacatatnggtacatgtatgta

SEQ ID NO: 48939 - DNA, 384 bp, Gossypium hirsutum
  Clone ID: LIB3196-058-P1-M1-C1
agaggaccattaccaaggcgaggttaaccgcaatggaggcagctggctccgactccgacggcagagaattcaaaaacgcacaagagatgtggagggaacaaatcggagatgaaggtgatgatcctaagaagattcaatggtaccgtgaaggcgttgcttattgggaaggtgtggaggcgtctgtggatggagtattgggtggatttgggcaagtaaatgatgctgatattaaaggtagtgaagcttttctcaattcccttttgcatgaaagatttggtgatggtggaagaaatcagcaccttgttgcccttgattgtggttctggcatagggaggataaccaagaatctactcataagatattttaatgaggttgatcttcttg

SEQ ID NO: 48940 - DNA, 386 bp, Gossypium hirsutum
  Clone ID: LIB3196-058-P1-M1-C11
atggatcgcggaacgtaatggctgtcgtcccggcgtctctctcaggacaggacgtggggttcgtcttacttttctcttccccacttttgcgtaaagctgggcctcatcaggagcctgtggggactaagcggagggcgctcgctctccggtgggctgcgttcgagtcccgccgccgggcgcggcttcccaggacgcctttgcgggtttcgcggactggctcggaggcgaggggaggcggccccggggagggagcccgcccgcggtggctgctcgtaaggatcaggacagggctcagcttcgcggtctgttcctggcggtcacttttcatttattcactttaatgaactcgctttgggggcgttaaaattctccgtaagagttgggga

SEQ ID NO: 48941 - DNA, 299 bp, Gossypium hirsutum
  Clone ID: LIB3196-058-P1-M1-C12
aagatgtgctctgcagaatgcttcttcagttgcaggaatggtccttaccactcaggccattgttgttgagaagcccaagccaaaggcttccgccgccgctgctccatcaggtcttgctgtataatgagtaggatatatgcgctcattaggttttctgaagatgaagagcagtattcttgccgtgaatcacaagaaaatgccaaatgaatagagattgtccttgtaagaaaattttccttttatttttgtttttctcttgtatggactaataacgaaacagctttatcttgggatttgcg

SEQ ID NO: 48942 - DNA, 259 bp, Gossypium hirsutum
  Clone ID: LIB3196-058-P1-M1-C2
aaaaccctccattattttccgattggaaggctcagatcgaacctagaaaccgacagtatcttctccgtcttcagcaacttcctgtcaatagcgtttttaagtgttgttggctctttttgccaatggagaaaggagtgccatctagcctttttgttaatgatggttccttcatggagaggtttaaacagcttcaacaacagaaggatgacaaagacaaggctgcggctttggaggaatctaaaccccccaaagttgtaaa

SEQ ID NO: 48943 - DNA, 382 bp, Gossypium hirsutum
  Clone ID: LIB3196-058-P1-M1-C3
cccacgcgtccgattcttcccagctggaagccaacgccctcagtcatatctccgagcctttagtcgtgaaattcttgagcctgccttcaatacacgaagtgagcagctagacgagctgtttggtgggaggcaaagccgtcgaaggcagcagggacagggaatgttccgtaaagccagccaggaacaaataagggcattgagccaagaagctacttcaccaagggagaaaagtggcgagagattcgccttcaacttattgagccaaacccctcgctactccaaccaaaacggccgcttcttcgaggcttgcccacgtgaattccggcaactcagggacatcaatgtcaccgtttcagccttgcaattaaaccaaggatcaatc

SEQ ID NO: 48944 - DNA, 346 bp, Gossypium hirsutum
  Clone ID: LIB3196-058-P1-M1-C4
atcatggagatgcttgaggctccccatcaactggcctgagctcagaccctgacgtggtgcttctcacactggaggagcacacattctagagggactccaagccctggggcagggtggggggccatgttcccagaaccttgatggggtgagaagtacagggcagaaccaagaacataaaccctccaagggatctgcttgatatcccaagttggaagggaccccagatccctgtgaagactggttgtctcccttcagtggccttgagtctctgaatttgtcggggtctcccgtgatttggggtgatttctcaccctctgtccttcccccagcacaaagcactggccct

SEQ ID NO: 48945 - DNA, 347 bp, Gossypium hirsutum
  Clone ID: LIB3196-058-P1-M1-C5
gcgactcaaaagctgctttcctcatcacttttaccagctactctgccttgcatgctgtttcaacgagcactacaaattctcttagttctaggatgccaacaaatattcagatacgcttcattaagaccatgcttgaaccttttacacatagtggcttctgaagacatgcattctcgcgcatatttaccgagcctcacaaattcatgttcatattccgtcaccgatattcagccttgctttagctctagaaattccttcctctgtggatctatgaacctttggctaatatacttatttaggaactctgcctggaagaattcctaagttatactctctgttggtaccac

SEQ ID NO: 48946 - DNA, 394 bp, Gossypium hirsutum
  Clone ID: LIB3196-058-P1-M1-C6
attcgccatggatgatgatatcgccgcgctcgttgtcgacaacggctccggcatgtgcaaggccggcttcgcgggcgacgatgccccccgggccgtcttcccctccatcgtggggcgccccaggcaccagggcgtgatggtgggcatgggtcagaaggattcatatgtgggcgacgaggcccagagcaagagaggcattctcaccctgaagtaccccatcgagcacggcatcgtcaccaactgggacgacatggagaagatctggcaccacaccttctacaatgagctgcgtgtggctcctgaggagcaccccgtgctgctgaccgaggcccccctgaaccccaaggccaaccgcgagaagatgacccagatcatgtttgagaccttcaacacc

SEQ ID NO: 48947 - DNA, 376 bp, Gossypium hirsutum
  Clone ID: LIB3196-058-P1-M1-C7
catgaagtgtgatgtggatatcaggaaggatctctacggtaacattgtgctcagtgggggttcaaccatgttccctggtattgcagaccgcatgagcaaggagatcactgcacttgctccaagcagcatgaagattaaggtcgttgcaccaccagagagaaagtacagtgtctggattggaggatctatcttggcatcactcagcaccttccagcagatgtggatttccaagggtgagtatgatgaatccggtccatccattgtccacaggaagtgcttctaagttttgtaattgcttttgatggtgatctacattttgcatttagttggctttttttgtgtgcggtgtcaagtgaactccaaagtctggtttatg

SEQ ID NO: 48948 - DNA, 356 bp, Gossypium hirsutum
  Clone ID: LIB3196-058-P1-M1-C8
acaactgcacatatatagaacaggtgggtccacacatagacagcatacctggtaccggatcggaatttccgccatagcggatgctgacgctgccgaggtttcaggcagtgagaaaggacgtgcgtgagtgatgatcgtcgagcgctttaatcgggaaacaagtgcacccgtcttcaatacacctactgagttgctggacctgctcacacgtgggaggaataaaacctgaaagcagcacagacagggaaggttaccttatgcaagccacaaacacatcttgtcactcatcccggaggctactgcaccgctggagatatagcgcgaaagattcaaccttaaattgttgagccgtaccc

SEQ ID NO: 48949 - DNA, 319 bp, Gossypium hirsutum
  Clone ID: LIB3196-058-P1-M1-C9
gaagctgctttggcaagtgcacagcaagaactggtcgacaaggaaagagagatttcatggtggaaagacactgcacggcttatgtcgattcatgtccaacaaccttcacagtttggttcctagctgaggtgagaaaatttcttactgctttttttcatgtgtatcatatcaggtgtagttgtttggtgtttaaagatgaattgtttgttattttggctttaaaagcattttggatggttgattagtttgcaagtgaaacagggaaattatttcacatttttaagggatattagtttatcaatgaatagttatctacatt

SEQ ID NO: 48950 - DNA, 383 bp, Gossypium hirsutum
  Clone ID: LIB3196-058-P1-M1-D1
cccacgcttccgattttatggttcatgaaaattaattcgttccacatttaaaattactacttctaataatgtatgaattttatactgacatatcttattattattgcgctcaacaattatttataaaaatcaattccctataccttaccgactgccatccacctttcttaaaaaagaaaaacttcaaacgttaggaaaacctatttaaatagttcaatattaatttttttcataaaataattaattattatattattttaaattgaaatatgaaatgtaaaatatttttttataaattagttaaataattaaaattatatttttttcacatgtataaatatttttataaaatttacaaattttatattcaattaatttataat

SEQ ID NO: 48951 - DNA, 369 bp, Gossypium hirsutum
  unsure (1)..(369): unsure at all n locations; Clone ID: LIB3196-058-P1-M1-D10
gcttacacttctttgctttcttttagcgtttgcttgcttgttctcttccatggctgctgtgctcagatagatctcgtcactaaccatcaccaggatccaccttgggggcagcctcagcaacctcagccacgtcaccaatcccaatgccaactccagaacttgaatgctcttcagcctaagcaccggtttaggtcagaggctggtgaaactgagttctgggaccaaaatgaggatcaattccagtgtgctggtgttgctttcctacgtcataagatccagcgcaaaggacttttattgccttcatttaccagtgctcctatgcttttctatgttgaacaaggggagggtattcatggngcggtcttccca

SEQ ID NO: 48952 - DNA, 371 bp, Gossypium hirsutum
  Clone ID: LIB3196-058-P1-M1-D11
gccgaatggatttccttcttcaccaatagcgaagccaccaacaccccaatggctggaagtgtctccttcatgcgagcactgccggaggaagtggtggcagcgtcgtatcaggtgtcaagagaagatgcaaggcggattaagttcaacaacaaaaacacctttttcttcactccttcacagtccgagaggagggccgatgcttaaactccagccgatgccaatgcaatcaaaatcagggggatctttgtagggtaacgtaagtaggaagtaataaaaagagttgcagagctatgtccgccatggattttgttgttgatcgttgaggtactgaaagattagggtttagaggatgaataataaaaagaaagggt

SEQ ID NO: 48953 - DNA, 370 bp, Gossypium hirsutum
  Clone ID: LIB3196-058-P1-M1-D12
ctttgatgaacctccgaaaaagataagagaactaaaccctctttgtctctggctacaactccaatagccgctttattctgtcctttttcatatgctgcatcaaagttaattttgacaaagttatcctctggtttttttccattttgtaacaatagatggagtttgtctactattttgtgcaaccgattctaactctaaaatgtatctgttaacaaatcttgctatgtcttttccagatttacaccctttattatgcagtctgttattcttatcaccccagatggcccatacagcaacacagaagggcattaacgaaaaaggtgatccatagattcaggtccagatccacaccgaggacacactgaaaaga

SEQ ID NO: 48954 - DNA, 381 bp, Gossypium hirsutum
  Clone ID: LIB3196-058-P1-M1-D2
cggacgcgtgggttttccttcctcgaacaacgccaggaacaacgctgacagcagcgaagacgacgacgacgattctcctgtggcgcgtgatgaaacgcgccgacttggagcggcattagaggaggagagggcgttatctgcgagagaagcggcggcggcacaggaagcggcgacggtggcagagaccaatgctaggccaattggttccaccgaggagccggtgaggatgtcattgatggactttttggaagaaacagagcgacaaatgggcctgacggtatcgaaatgcacgacgggcgacgccgacgccgatgacgaagaaaacgaggagaaagacaaggcggaagggagcggcgggatggagcagacgtgttgcgtgtg

SEQ ID NO: 48955 - DNA, 396 bp, Gossypium hirsutum
  Clone ID: LIB3196-058-P1-M1-D3
atctcagatctccagctgtctctgtgctaatgaagctaaaacctatcactggaacatcacagctgtcaaattgggtcacattaactttactattagtacaaagattctggacagcaatgaaccatgtgggggccagaaggggtttgttccccaaaagggccggagtgacacgctcatcaagccagttctcgtcaaacctgaaggagtccttgtggagaagacacacagctcattgctgtgcccaaaaggaaaggtggcatctgaatctgtctccctggacctcccagtggatgttgttcctgactcgaccaaggcttatgttacagttctgggagacatcatgggcacagccctgcagaacctagatggtctggtgcagatgcccagtggctgtgg

SEQ ID NO: 48956 - DNA, 357 bp, Gossypium hirsutum
  Clone ID: LIB3196-058-P1-M1-D4
ccagaatacagaggttcgggaccgtgcttttagtaggctaaagaggtaaaattgagttaatgtatcgagccaacggcaataaaaaagtggtagttgtgcctcattccatgggagtagcctattttcttcacttccttaaatgggtcgaaacgccacctccgatgggaggcggtggtggcctcggttggtgcgctgaacatatcaaggcaattgtgaacatcggcccgtcatttcttggtgttccaaaggctgttagcaatatactctctgccgagggcaaagacgttgcttatttcagagcaatggcaccgggagttttggattcgggtactttagggcttcgagcattagagcatg

SEQ ID NO: 48957 - DNA, 220 bp, Gossypium hirsutum
  Clone ID: LIB3196-058-P1-M1-D5
aaaaaataggtgagagaaagggttagtttttttgaagatggcctgggaccggtcaagggatccgatcattcctttggcgcggctccgctctgccggccacggtacactgagggccaaaattcgggtaaggtacacggtggtggatgtgacaaaggctgagcatcccaattaatggtggtcacagggatcgaacttctgggcaccacagatattttaatga

SEQ ID NO: 48958 - DNA, 363 bp, Gossypium hirsutum
  Clone ID: LIB3196-058-P1-M1-D6
gccctattgaaccacttgggggttaagcggaatgaggtaacaagcgatggtttgttctcagtcggagaaatggaatgtatgggatgttgtgtaaatgctcctatgatcacagttgctgattactccaatggatctgaaggatacacatataattactatgaagatattaccccaaaaagagttattgagatagttgagatgctaagaaggggagagaagctaccacctggcactcaaaatccaaaacgaatcaagagtggaccagaaggtggaaataccactttgctaaccgatccgaaacctcctccatgccgagatcttgatgcctgctaatgttaacatgccaccgcagtctcaaataat

SEQ ID NO: 48959 - DNA, 390 bp, Gossypium hirsutum
  Clone ID: LIB3196-058-P1-M1-D7
atcttccctctcacctccagcctctcacgctctcctcagctctctcatctcctggaaccatggccagcacatccaccaccatcaggagccacagcagcagccgcaggggcttcagtgccggctcagccaggctccctggggtcagccgctctggcttcagcagcgtctccgtgtcccgctccaggggcagtggtggcctgggtggcgcatgtggaggagctggctttggcagccgcagcctgtatggcctggggggctccaagaggatctccattggagggggcagctgtgccatcggtggcggctatggcagcagagccggaggcagctatggctttggtggcgccgggagtggatttggtttcggtggtggagccggcattggctttg

SEQ ID NO: 48960 - DNA, 370 bp, Gossypium hirsutum
  Clone ID: LIB3196-058-P1-M1-D8
gagaaattaaccttatgctcagacctgcttcttcttgtcatatgtggtgtctttagaggtggcaaaaggcatgctcaggatctctgcttgacaaatggaatcctaatcaactaaagtgggcagggagagtggaatcttcaacagccttttgttcaataacatccaatggtgagtggttggtttgcatattgcaccttcatttttccatacaggaattgcgtgctctgctagtcataatcacactagtagtttaccagttgattggggctcccacttggccatgactttgatatgcacttgcaaaattttatcataagcttcaacataatacacgcatgtgcttatcatgagatgatttgtatgagtgctt

SEQ ID NO: 48961 - DNA, 365 bp, Gossypium hirsutum
  Clone ID: LIB3196-058-P1-M1-E1
gtaggaacagtaaagaactagtggagattgttaaagaagttgatgaatatttccttaaagctgctgatgccggtagccatctttcattactgttagaagcttcaaatcccaatctttcaggcaaagggtataataactatgcctgtaacttaaccccaacaacatggacatggaattggagccccaaaatagtggaaaacaccattgttggacatacaggaaatactagccattgttccaccatagagaggttatatgcttgggagaagaaactataccaggaagtcaagaatgctgaggctataaagatagaacatgagaagaaagtggcacatatgaggaaacttgaagtgaagagagctgag

SEQ ID NO: 48962 - DNA, 368 bp, Gossypium hirsutum
  Clone ID: LIB3196-058-P1-M1-E10
ctttttctcttcaatggctgcctagctcgccagaccttttcgtcacagcagtcccaaaatgagtgtcaaatcaataggctccgcgcctctgcaccccagacccgaattcgctccgaagccggcaccaccgagtggtggaaccccaactgtcaacagctcaggtgtgctggtgtatctgtaatgaggcagactattgaacctaatggccttgttttgccttccttcaccaatgctcctcagcttctctacattgtccaaggaagaggtattcaaggtattgtgatgcctggatgtgccgaaacattccaggattcacagcaatggcagcatcaaagccgtggcaggttccaggaccagcaccagaaagt

SEQ ID NO: 48963 - DNA, 350 bp, Gossypium hirsutum
  Clone ID: LIB3196-058-P1-M1-E11
cggacgcgtggggtagagatgaggaaaatcatgggtgccaaagttctcttcttctttgctttgctttccttttcagctgtgtcggcatttgcacaggatgaggaagaccaaggtcttgttatgaacttctacaaggattcttgtcctcaggctgaagacattatcaaggagcaagttaagctactgtacaagcgacacaaaaacactgctttttcttggctgagaaacattttccatgactgtgctgtccagtcatgtgatgcttcactgctgctggactccacaagaaggagcttgtctgagaaggagacagacaggagctttggcctaaggaatttaggtacattgag

SEQ ID NO: 48964 - DNA, 164 bp, Gossypium hirsutum
  Clone ID: LIB3196-058-P1-M1-E12
atgcacgctgagccactctcttccctttccccagcatcactccccaaggaagagccaagattttccacccataatcctttctgctgacccctaggttccctctgctcagccaagcttgtatcagctctcagggccatggttaaataaaagatagtaagtagaac

SEQ ID NO: 48965 - DNA, 377 bp, Gossypium hirsutum
  Clone ID: LIB3196-058-P1-M1-E2
tttattttaaaaaaagaaaaacaatagaagagatgctatataatatgttttggcccatttccgtcctgcagttcatttcaagcactcacatcacaggttaggtttggcgcgatcttcatttctcaaagtgtgttggtttacacttctgtagtagcaagaaaagagcaagtccaatatgaagtttaaggcatttctcaccgaacatggggtgaatctcttagaaaggcggtttctacctgccttggacaaaatgggcaagatatgccacttatttctcacccgagaccatgctatctttcttcacaaccttctcaatggcgatggggttcagtgcattgcacagtttcgaaaggaagctctctttgatgactatcgca

SEQ ID NO: 48966 - DNA, 379 bp, Gossypium hirsutum
  Clone ID: LIB3196-058-P1-M1-E3
cccacgcgttcgcccacgcgtccgcccacgcgttcgcccacgcgttcgtgataatataattttaaataaaatagaataaactttttctctattaagtgatatataagtatttatacttatcatttttataattttttttggaaaattttctatcgagtgaatgctattattaattatcaaatatgtttaaaaatttaagggtaaactacaaaaatagtcacttttgtttgtctcagattacattttagtcactcatgtttgaaatgttacgttttagtcacttacgttatcattttgttatgaagtggccattcttccgttaaactccgttacctccctaacggcagtcctacgtggcagcccaaatgagtttcaaatg

SEQ ID NO: 48967 - DNA, 331 bp, Gossypium hirsutum
  Clone ID: LIB3196-058-P1-M1-E5
atttgaaattatagggatttgagttcgtgtggatttgaagtactttcttgagcatatatggaccgtgctgaactatccactgaacaggttctgaagagggacatcccatgggaaacatacatgacaactaagctgatttcaggaacaggcctgcagctgttaaggcgttatgataatagagctgaaagtgtcagggcacagttgttggatgatgatggtccagcctatgttcaagtgtttgttaacatcttacgtgatatctttaaagaagaaacagtggaatatgttctggctttaattgatgaaatgcttacagccaatctgaaacgag

SEQ ID NO: 48968 - DNA, 356 bp, Gossypium hirsutum
  Clone ID: LIB3196-058-P1-M1-E6
atagaaattgctgacaccatggtacaaatattcaaaggacttcaagaaaggtttcagactgaaattcaaacggtgaataaacagttcccatgtgagccattcaaatttttggagccaactctaagactagaatattgtgaagcattggctatgcttaaggaagctggagtcgaaatgggagatgaagacgatctgagtacaccaaatgaaaagctgttgggtcacttggtaaaagaaaagtatgatacagatttttatattcttgataaatattcattggctgtaagacctttctatacgatgcctgacccaagaaattctaaacagtccaactcttacgatatgttcatgagagg

SEQ ID NO: 48969 - DNA, 375 bp, Gossypium hirsutum
  Clone ID: LIB3196-058-P1-M1-E7
agagcctcttcgcatctcggagaagtcgcagaaaagtgagagagctgaaacgctgtcgtcaaacaaatggctgtctcctcgtgttcctttcctcctagggttttcaatgcttattcttcattcgagtgccgttccgatcccgacttctccggtacgccgaccggggagaagcctcgcatcgggtctaaccgacgagtaacggcatcgttgttttgtacaggcggtgggggtttgtcgtctttgatctttcgtttccccccgaacttcgtccgccagctcagcgtcaaggctcgccgcaactgtagcaacatcggtgtcgcgcaagttgtcgcggcttcgtggtcgaacggtcccacttccggttacccctcatcg

SEQ ID NO: 48970 - DNA, 374 bp, Gossypium hirsutum
  Clone ID: LIB3196-058-P1-M1-E8
cttgcccctgttatgggaaaggatattacttgttcaaaacttctgcccgtggttattaatgcttctaaagatagggttccgaacatcaaatttaatgtcgccaaggtgttgcagtcacttatccctattgttgatcaatctgtaagtaaatttattttcgttttaaagggaaaatcatatattcggagtatattctaccctcttgttcgaaaatgcgtcggatattgatatagaaaaaaggggttgagtttgctactagcatgcaaaattttcatatgcaatgcctattttgtttcattaggtgtctttttggcttttgcttagactctaggctaaagtatgtttcaagttcttgtatctttttatttatcgct

SEQ ID NO: 48971 - DNA, 372 bp, Gossypium hirsutum
  Clone ID: LIB3196-058-P1-M1-E9
aaaaaactcaagagggccttattctttttctctgctggggctcctgcgccgatcatgggtccggtcatcggactgacgtcatccgccgcgaggtcgctgtccagaaaatcgaaaaggcgcaagtggaggcactgactaggactgtggagtaggtggccgactggcatgggggatgggacagaggtcagaggcggcagcagctgatttagggtttttttgtttcacctttgattcgggctattagggttaatttgggcttggggtttaaatttagctgggtttagctatttgggtctgggtctgatttgggctttttgggttgcaattttagattgtaaaaaaaactgaacttttaatttatttttggttttt

SEQ ID NO: 48972 - DNA, 366 bp, Gossypium hirsutum
  Clone ID: LIB3196-058-P1-M1-F1
cctaaaattcattcaagtagttagtgtgctgcattgtaaaacgtaatataaacagactaacctatatacaaaaattcaaatattattgattattcggataataattcgtctactcaaatagatcaataacttaatcggatccaagcacaacaatcttgatgcatagaagattgatacaaatgcacgtataacaccaatacaattatgtgcacacgtcatacagtacagatgcagatgaaatttcctattgcatctgctacacgccatcttcattcaccttacccaccaacaggtatataatacacatccatccctacacatttcatagtgtcgatatgacacgttgcagtgtttacagtctcacta

SEQ ID NO: 48973 - DNA, 370 bp, Gossypium hirsutum
  Clone ID: LIB3196-058-P1-M1-F10
ggtatttcaataattttgtaaatcgagggtaaaacgataattctgtaaatcgggggtactttggtaattttacaagttgagggtattttggtaatttcacaaattaggggtattttggtaattttacaaaccaagggtattttggtaattttacaaactaggggtattttggtaattttgtaaaccaagggtatttcagtaattctagcctacagatatgagattcacatagtccaacccaatatttactacacaatcaaagaacttatccaattgggcccgtaggcccattgggcccatatagccccttttggcccatcgcggcctgaagtagccctcctacagctagagtagtgagaaatacacacct

SEQ ID NO: 48974 - DNA, 370 bp, Gossypium hirsutum
  Clone ID: LIB3196-058-P1-M1-F11
gcaccttcttgtttcttgtgttcgtaggatttaaaagtgtgcacaattcttcctcggtgcaacacaaatcaattggtgtctcgtcactttttggactcctagtgcaattaagattctttggtagttacagttcatacactttctaattgattgatatagactctactaaagaactcacaagactgaattctacctctttgagaatttgatttttcttttggagtgattaacggtgaggtttgttaattttttttcctagtgtttagtgttctttttgcaggtattccaaaagaaaaaaataagatgcatagaattggtcaagttgatgatgaccataatgatgtccatgataaatttaaagagatccaac

SEQ ID NO: 48975 - DNA, 251 bp, Gossypium hirsutum
  Clone ID: LIB3196-058-P1-M1-F12
aaataaatcaatatagtcattatttctaatgttaaatgaatacactctaccctaaactcatataaccacaaacgggaataccttatattattcttatttaaaactacctataggtcctgcccaactcataaataagagaattatgcacttcaacccactcaaactcatgtgcttttgcattagcatcaatgcacatgcccatacagctaagacttaatcaagcacaaaacttatattaggatcatcctaaa

SEQ ID NO: 48976 - DNA, 128 bp, Gossypium hirsutum
  Clone ID: LIB3196-058-P1-M1-F2
atccagagctatggacgacgcaatcgctagggggaacacgcgggaactcaaagactaataccctaaagtggagctggacaacaccgttgcttccatggtcaacgccctcctgcgcgtggagatcgacc

SEQ ID NO: 48977 - DNA, 156 bp, Gossypium hirsutum
  Clone ID: LIB3196-058-P1-M1-F3
ataacatgaaagctaagcactatgttcttcaaataaggaatcgtaacttatcgtgaggagattatatacaaaaaaaatgtaatttgaatttaatataatataatgacagatgtactaagtagtaagttaaaaaaaaaagcataggttgggttgata

SEQ ID NO: 48978 - DNA, 359 bp, Gossypium hirsutum
  Clone ID: LIB3196-058-P1-M1-F4
ctttctcttttaacatttctccttctacatctttctttcttttctttttttgggttggggtttggtactctcgtttgaatcaaagaaaccataactgtttgttctttttttctccctttgaattgaaacgattgaaagaagaaatgggttcagaaggatcatgtgttgttgtacccaggagtttcagattgctagaagagcttgagaggggtgaaaagggaattggagatggaactgttagctatgggatggacgatgctgatgatatatacatgcagtcatggactgggactattattggccctccaaacactgttcacgaaggatgcatatatcagttgaaactgttctgtggcaag

SEQ ID NO: 48979 - DNA, 372 bp, Gossypium hirsutum
  unsure (1)..(372): unsure at all n locations; Clone ID: LIB3196-058-P1-M1-F5
cttgtcattggagtttgtttgactctcaacattgccaatatcgtcggcttcaccaaatgtcgcaaagatgccaagaagcagattcaacagtttgccacccagaccattgcctcaagattttcttccaccttacaatcagcatttagtgttgtttgaaatagtcgatagtaatatacaagaacgaaaacggaagaaaatgcagtagtagacgagagaagttaacaagtgtggcatgtaaaaaaaacgaggcgtatcgaattgccgattttcgattgtttttttctttatggtacatctaatgcttttgtataatgaatcacacagtaaaactttgtgataacaatggtctntctgcaaaggttacattcctac

SEQ ID NO: 48980 - DNA, 332 bp, Gossypium hirsutum
  Clone ID: LIB3196-058-P1-M1-F6
caatccagttatatatatcaaaaaacgtaccatggcaaagttcgctctcctcgtagccactttcgctctcgctttcttcctcgtcaacgcctccatctaccggaccacggacggcgacgaagaaaactggtaccgacacgatcggcgatcgtgtcaagaccagatatggcagcaaggctacctcccaaactgtcagtggtacatgaacgaacaggccggccgcagccacagcggatatggcacccactacctcaactcgtgctgctacgagctccagaacctaaggcaggattgccggtgccaaggcttgaaacaagcgttaggacaacagc

SEQ ID NO: 48981 - DNA, 387 bp, Gossypium hirsutum
  Clone ID: LIB3196-058-P1-M1-F7
atcgcttatcatcccccccgacgccgtcgctgtggactgcaaggacccagatgatgtggtaccagttggccaaagaagagcctggtgttggtgcatgtgctttggactggcatttatgcttgcaggtgttattctaggaggagcatacttgtacaaatattttgcacttcaaccagatgacgtgtactactgtggaataaagtacatcaaagatgatgtcatcttaaatgagccctctgcagatgccccagctgctctctaccagacaattgaagagaatattaaaatctttgaagaagaagaagttgaatttatcagtgtgcctgttccagagtttgcagatagtgatcctgccaacattgttcatgactttaacaagaaacttac

SEQ ID NO: 48982 - DNA, 372 bp, Gossypium hirsutum
  Clone ID: LIB3196-058-P1-M1-F8
ttcccctttttcagcctctaagatttgcgtcattcatttcatctgcttctttgtactcccttccggtcattttcctttagtcgctcggcataatccagaactgtgccaatcaggtaaatttcttccttcttctttaatgcctcccttgctagcatatgagccagactattcgcctctctaggtgtgtgctcaaaatagggtcttttttattttattagtaactgatcaatatctggaatatatgctccaacccttgatctgtcatttgcttgtgttgtgcatttcttaatgattgcaagtgcatcaccttcgataatgatatttgggcattgcatgctcataccgatgcgagttgatgtcctgcacgctatt

SEQ ID NO: 48983 - DNA, 373 bp, Gossypium hirsutum
  Clone ID: LIB3196-058-P1-M1-F9
cccacgcgtccgaaaagatctggcatcatacattctacaatgaactccgtgttgctcctgaggagcaccctgtgcttctcacggaggcacctctcaaccccaaggccaatagagaaaagatgactcagatcatgtttgagaccttcaatgtacctgctatgtatgttgccatccaggctgccctctctttgtatgccagtggtcgtacaacaggtattgtgctggattccggagatggtgtttctcacaccgagccaatctatgaacgatatgcccttgcacatgccattctacgacttgaccttgcaggtcgagatctaaccgatgccttgatgaagattcttaccgagagaggttacatgtctaccaccac

SEQ ID NO: 48984 - DNA, 398 bp, Gossypium hirsutum
  unsure (1)..(398): unsure at all n locations; Clone ID: LIB3196-058-P1-M1-G1
atccggaacagcctcacatacctcactgtctcgtctgttcatgtgacattaagtagaaatattggttttttaaaaataagtcacagtcctgttgtcaaaactctaatagacagcaaagagggtctgtaccgtagacttcacagttttcagtttttaatgattgtcagtggaggggcttctccagcacagagaccccacccctcccccgtgtccagagacccccctctgccaggtggaggtgtgtccaggggctggggaagccgagatgggcgcttcctctgccggccggcagcgtggtccccagcatgggtcaggggtctgtctctggctatgccccttncgcggcactctgcgccgtgtgacatgggttttgaatcacactgcagctgcttttcatt

SEQ ID NO: 48985 - DNA, 373 bp, Gossypium hirsutum
  Clone ID: LIB3196-058-P1-M1-G10
gtttctcctgacaaggtacaggcggtgttgttacttctaggtggatatgaaatcccttcaggcattcctgcaatggggacagtgtctgttactcaaacgggcttaagtgactttcctgggaggtcaattcagccacagagagctgcttctttaaaccggttctgggagaagagaaaagagcggtgctttgagaagaaaatccgctatactgtgcggaaagaagtggccctcaggatgcaacgtaagaagggtcaattcacatcatccaaggcaatttctgaagaagtagcctcagcctcttcaggatggagtggaacaccaggttctgggcaagatgagaatattcaagaagttttatgtacacactgtggaa

SEQ ID NO: 48986 - DNA, 387 bp, Gossypium hirsutum
  Clone ID: LIB3196-058-P1-M1-G11
atggctccttagattgggtcattactaaaagtacattaaaacactcttgtttaaaaatgaattatttccgtaatcgaagtgtattgatgtattctaaagctagtaaacttccctaatgtttaattgccctacagatgcttcttttgctgtgggttttctcctgttagtggtctgaaataatgattttcctgttctattaatatatagtgtattttgcacaaaaaattaacctggtcagtagtgattaccaaaatatgtattaataatcttggcaatttttgacattttagcccacgttagttctacattattcttaaaagaaactcagctactgcaaattttgtctttctgtaaatgttattaaaatatccagtgagctcttttaga

SEQ ID NO: 48987 - DNA, 378 bp, Gossypium hirsutum
  Clone ID: LIB3196-058-P1-M1-G12
tcggatgaagtggacatggttgagttttcagggccttagtagtgtcactctcacaaagttggagaactcttagaacgacatgaacttaagatctcccaagcgattcgtaagtcatggttttaaagaggcaaaaaacatgggaaataggcttatgctactctgatgtctaatggcgcggtacgaagaaatttgtgcctctactccaactgcatcagcgctaagttgaccaccatgtctataaaagcatgccattaacaacctggaactgatccttgagctccacagcggcgaagaacgaaactcagaaactgcaatatgatggtactgtggcgtgtatgattttgtagagcctctaatgggagagggaccttaggtgac

SEQ ID NO: 48988 - DNA, 128 bp, Gossypium hirsutum
  Clone ID: LIB3196-058-P1-M1-G3
cccacgcgtccgatggagtccaacaccaaaatgtcagctcttcttttgatttgcatgcttttcatttcttcagtgacaccaattcttgggtgtggttcatgtgggaaagcacacaagcatcgaaagcc

SEQ ID NO: 48989 - DNA, 372 bp, Gossypium hirsutum
  Clone ID: LIB3196-058-P1-M1-G4
gaaaatgatggtcctacaactgtgaatgttcgaattactggtcttactcctgggcctcatggcttccacctacatgagtatggtgacacaacgaatgggtgcatgtctacaggagcacatttcaatcctaacaatatgacacatggtgctcctgaggatgaagtacgccatgcgggtgacctgggaaacataattgctaatgctgatggagtggcagaggcaacaattgtggacaatcagataccactaagtggccccaatgcggttgttggaagagcatttgtggttcatgagcttgaggatgatcttggaaagggtggacatgaacttagtctaaccactgggaatgctggcggaagattgcatgtggtg

SEQ ID NO: 48990 - DNA, 377 bp, Gossypium hirsutum
  Clone ID: LIB3196-058-P1-M1-G5
atcccatgaaaatttgtcctctttatgggtcatatatatctgcaagagagtgacatcatttatatccttaactagttcatataatcatctgctcgaataaacttagcttaatcttgatataaaagaatgggtctcttaagtcttccagccccatcagaaggagtgctatgtgtactcttggtaaacacagctatatccatatctatggataaaggcataattcgatcaatccttcacattatccggattcatctctcctcgtcctcgtcctccttctcctcctcgtcatcatcaccatcatcatcatcatcgccatcctacgatcttattgaaatccctgcggtatcattcgacatcagcatcggaaatgctgatag

SEQ ID NO: 48991 - DNA, 382 bp, Gossypium hirsutum
  unsure (1)..(382): unsure at all n locations; Clone ID: LIB3196-058-P1-M1-G6
ataaaaaacctaaaagtcagtctcttactggcaaggtacttcctgaattcagcgaaaaagcactaatggaaccaatccagaaaaagggttaaagttgtccagtctttcttgtacaaccaaaagactggcaactgttgtttatcttttcccttcaagctcaggggttagcaggtatattgaaaagggcagtcctgatcatgactgcttgtgcataaggcagtagagttagcctatttcttactgccttaaatcctagtgctcacttgtctttcttataaataagtgtactttttcccagaatagggcagttntgtctgcaattaaacttgttcatgcagatatccgttctcttcagtgattttcttagtgtctgggaactcat

SEQ ID NO: 48992 - DNA, 337 bp, Gossypium hirsutum
  Clone ID: LIB3196-058-P1-M1-G7
gctgttttaagaaaaacattgcgaatagggagaagggtgagagagataaaaggggaacaaaagaactgcaaaaaaattgaactttttttttcctaaaaaacctcaattagaagagcgattatcgcttcatcttccccgaaacgacttcgtcagatttttttcaggttgcttttgttgccatggctgctgctgcgactgcctctggtggtccacgatatgctccgcctgaccctactcttcccgaaccatggaaaggcctggttgatggaaaaactggttatctctacttttggaatccggaacaaatgtcacgcaatatgagaggcctagagggata

SEQ ID NO: 48993 - DNA, 373 bp, Gossypium hirsutum
  Clone ID: LIB3196-058-P1-M1-G8
aggagatccacttatccaaaagaaaacaacacgtgaataagaatatgttttccaaaatattatgttttactattttaagctaactaacagtgagtaactgcgaaccagacttcacataagtatgtcgaacccagttcgtagttttgtgaccttgtcaaagctctagtttaacttatgtttttggtgttctatgtggtatttctttcttgtatatttactgtgtaacagcccaattttggtgaaatcgaaatagtagtcttgagaccacaaatctgagctgaaaaataaaatttatttttattttaatatatggtccatattatgatatacatgttacgtgaaaattttcagaagaaaattttatcgattatgt

SEQ ID NO: 48994 - DNA, 373 bp, Gossypium hirsutum
  Clone ID: LIB3196-058-P1-M1-G9
atcgattggttgaaaggcctgaaagaaaacgttgtgcttgggggtatgatacccgccggtaccggattcaaaggattagtgcaccggtcacggcaacataacaacattcttttggaaacaaaaaaaaagaatttcttcgggggagaaatgagagatattttcttccaccaccgagaattatttgactcttgcatttcaaacaatttacatgatacatcaggccgctcttttataggtatagaatttaatgattcttaagataatttgttgtggtcatttgagttgttaatttgttaatagtaataaagagaataacgaatagaaagtaatggcttggctcgtggataaacgaccaatccccggtagaagagaa

SEQ ID NO: 48995 - DNA, 311 bp, Gossypium hirsutum
  Clone ID: LIB3196-058-P1-M1-H1
tccccttactgaagattgagacaaataatccctctttgctagctggaaattggtgtcaactttgtgcgacatgcaagattgttaggcctcttcgtgcaaaacactgcttcacttgtgatcgttgtgtcgaacagattgatcatcattgcccttgggtatcaaattgtgttggaaagagaaacaaatgggactttattcttttccttgatttagagggttgagcaatgctcgttacttgtggaggtactattgcaagaattgtgtaagatccagtggctccgtcatcatttttgccatggatgaactatgct

SEQ ID NO: 48996 - DNA, 378 bp, Gossypium hirsutum
  Clone ID: LIB3196-058-P1-M1-H10
aaaaaattaaaccatgtatcaccctcaagttccaggcgagcccacccaaaccaccacttgcctcgtcgagaccgccaccggcgccatccaaagcttccgccctatcaaacaaatccatcaacacctctgcgcatttcatttctatggctacgacatgacccgtcaagtgcaagcgcaccatttctgcgcacatcaaaacgaagaaatgcgacaatgtctcatatatgacacccccgaagccgatgcaaagctcatcggattggagtacatcatatcggagaatttgtttttgacgttgccggacgaagagaagccgctttggcattcacatttgtacgaagtgaagagtggggtgttgtttatgccgcgagttccggg

SEQ ID NO: 48997 - DNA, 95 bp, Gossypium hirsutum
  Clone ID: LIB3196-058-P1-M1-H12
attttctgtttcaatttctcaacccatgaatattgacatggtgtcgcaatttgaggctcctactcattcaccaagtttgttccttgcttataccc

SEQ ID NO: 48998 - DNA, 355 bp, Gossypium hirsutum
  Clone ID: LIB3196-058-P1-M1-H2
gttccaagaacgattcagggaagaacatggcaatttcagagtcctccagaggtttgctgacaaacatcatttacttaggggcatcaacgagttccgcattgccattttagaagcaaaccccaacactttcgttctcccacaccattgtgacgcggagaaaatttacgttgtcactaacggaagaagaacagttacgttcgtgacacatgaaaacaaagagtcatacaatgtagttcctggagttgtagtaagaattccagcaggaagcactgtgtacttggccaaccaagacaacagggaaaagcttaccataagagtgcttcaccgacctgtcaataaccctggacaatttcag

SEQ ID NO: 48999 - DNA, 393 bp, Gossypium hirsutum
  Clone ID: LIB3196-058-P1-M1-H3
atgggagacctcttgggtgtggggtagagaaagttgaggtgccctaggagaacaggcatttttctgtacccacaggctactgatactataagctccaggctgacttcttctcagaccacctgggctgtgtcaccaagtgccggaagccatgcagtgtgaccagctaccagctctaggctggttactcacgatggacctcggtgacatcccaggaatgggtcttcgagatgctatcgcgacagaacaactacaccatcaacaacaagagaaatggagtggccaaagtcaacatcttcttcaaggagctgaactacaaaaccaattctgagtctccctctgtcacgatggtcaccctcctgtccaacctgggcagccagtggagcctgtggttcg

SEQ ID NO: 49000 - DNA, 382 bp, Gossypium hirsutum
  Clone ID: LIB3196-058-P1-M1-H4
gctacttcaccaagggagaaaagtggcgagagattcgccttcaacttattgagccaaacccctcgctactccaaccaaaacggccgcttcttcgaggcttgcccacgtgaattccggcaactcagggacatcaatgtcaccgtttcagccttgcaattaaaccaaggatcaatctttgtgccgcactacaattcaaaggctacattcgtgatccttgttaccgaaggaaatggatacgctgaaatggtttctcctcatcttcctaggcaaagctcatatgaagaagaagaagaagaagacgaagaagaagaacaagaacaagaagaggaaaggagaagtggacaatacaggaaaataaggtcccggttgtcgcgtggagaca

SEQ ID NO: 49001 - DNA, 345 bp, Gossypium hirsutum
  Clone ID: LIB3196-058-P1-M1-H5
atgcctgggcaaaaaagtgagaccctgtcactactgaaacaaaaacaaaaacaaaaacaaaaaatagctggtcccggtggctgtctgtagtcctagttccttgggaggctaaggtgagagggttgctcaagcctagcagtttaaggttatagttagctgtaacatgtactactgtactacagcatgggtgacagagtgagaccctgtttataaaaaaagagagacaggtttcaaataaataatgtaatgatgtatatcaaggaactcgaaaagcaaataatggtgatatgcaaacattgtaaaagctgacataaggaagtctctatcatgtgctttgcagcaaca

SEQ ID NO: 49002 - DNA, 256 bp, Gossypium hirsutum
  Clone ID: LIB3196-058-P1-M1-H6
cccacgcgtccgctcttccgtaatcttactttcagatttcagtctcagtaaagctttttttgcaccagccaaaatgggttcagttatatactctttctcggagtgagggcttttgttccaagtggtttactgcttcagccttcagcttcagggttggtgggttttgtactgagttaaagaaatgcctctatatgattgtatgcttttattgaagccccatgtgaagaaagaggggctcatcgaatttgtagcacgt

SEQ ID NO: 49003 - DNA, 371 bp, Gossypium hirsutum
  Clone ID: LIB3196-058-P1-M1-H7
gaaaatcgcatcttttttcataaaaatcatccatgaatttcaatttactccattatcagctacgaagtatatgctgagcttaccttcattcacatatctaattgcatgtataggattcacaacttgtatttgatgaaaactacttgctgctggtagtattacaacataatgcctttcataatatagttagtgtatgaatattgcaaaatttgacacttcctcattgcaatttccctatgtggagcattaatactacttatccttatgagtagagtggtaaggtttcaatttcaagtcttacaattgaagaaaacaatgttactatgaacccgacaaacaacgtggaaggacaatcagtgttctttcactcc

SEQ ID NO: 49004 - DNA, 370 bp, Gossypium hirsutum
  Clone ID: LIB3196-058-P1-M1-H9
atctttaggtatgatttgtaataaaagaccatggtttggttggtgatgtaatgaatatgtgctagcttgatttatatgattgagctaacggttgttattcgaatttgaaagcatggttatatgtccattgataaataaaataaatagagttatttaatgtggttatatgaatttacaagtacaatgaatgtatatgtgattgagatttgttaaattcgatttagtgatattggtttataaatatcattgaaatgatttatttgcttatgacttattaagctttcaaagcttactctgtgtgtttttcctatgtctctagagtttcagagacttgctcggatctgggagtcgtcgggaatatcatcacact

SEQ ID NO: 49005 - DNA, 271 bp, Gossypium hirsutum
  Clone ID: LIB3196-059-P1-M1-A1
atgttgagtaggcagaaaaaggagcctattcattaaggattaaaaggtataggccagcacgtgtaccatcgacttcaagatttctgaatccatatgtcgtatgtttcattgtcgtcacaagggtagtgatcctggcagtgaccatagatctacttgtttactttttagcttttgatcaaaaatcttacttttacaggagcagttgtcaactcctaaatgttgtatatattagtcagttaaattcaccagctacacacgaatacacgacttt

SEQ ID NO: 49006 - DNA, 353 bp, Gossypium hirsutum
  Clone ID: LIB3196-059-P1-M1-A10
cggacgcgtggggcagaaaatatctcaaatctcctcctcctcctcggaaatcttagtatcatcaccatggcctcaaatcccaaggtcttctttgacatgactatcggtggtcagcccgctggtcggattgtgatggagcttttcgcagattgcactcctcgcactgctgagaacttccgtgccctctgtaccggcgagaaaggcgtcggccgcagcggtaagcccctccactacaaaggctcctctttccatcgtgtgatccctaactttatgtgccaaggaggtgacttcaccgccggaaacggtaccggaggtgaatccatctacggatccaagttcgctgacgagaactt

SEQ ID NO: 49007 - DNA, 191 bp, Gossypium hirsutum
  Clone ID: LIB3196-059-P1-M1-A11
ggggcctgagggcatcactttcatgacctctaattaattctctctcactcacgtgaatgtcgacaacatggttcacatgattttggaactacataagatagaaaggccaaaaggacaaaaacaaaactgtttgtattgtaatttgtaacagaatattattataaggaaaataaatgtattaatctacctgc

SEQ ID NO: 49008 - DNA, 352 bp, Gossypium hirsutum
  unsure (1)..(352): unsure at all n locations; Clone ID: LIB3196-059-P1-M1-A12
gtgagctctatatagcatagggttccattttccatatatacctaccaaataatggcgtggaataaaatcctgaatatagattggacattcatggaatgaaagctagcggcccggttgcttctcttcctcctcctcatattttcccaccattttcttctttcattttttcatcacaaactaacttgtagtttacaaacagcggcaaagctagcaattcattatcagagaggccaaaataatattttaaaagcttcagggaaaagtttaaaattttatttaaaaaggatttaaattaaatatttcataactaaaaaggattaaaagagatattataccctntagctatccctct

SEQ ID NO: 49009 - DNA, 307 bp, Gossypium hirsutum
  Clone ID: LIB3196-059-P1-M1-A3
atgtcttttaaggatctgcggatctattgtcaaggacatggtaccgaacggtggacgctgactgtttgcagagcgctcacgaagctttacatcattacccacagcaagaggtctgagcttgagtctggttctcccactggacgtgtaatctcacatactacatattccaccctgctaagtaatagtgtgtagaacggaatggttgactttatctaaaatgtgggagtaaaaaagtacatgtgaaactgtaaaggtcatcattctggtgcaggtatcatgaggaaaggagaaaaccctgggtgggagc

SEQ ID NO: 49010 - DNA, 359 bp, Gossypium hirsutum
  Clone ID: LIB3196-059-P1-M1-A4
ccagaatatacgaaaacgatgaatcgagtccctccccaataccaaaggtagaattcgaatatcattatatgttcggtactcaacaatgaatgagttgtcccggtccctccccaatccaagggtagaattcggatagccaacaatggatgaatcctcccggtccctccgcttttgcaacaagagcctccatcaccttggtggctcggatgtgtgggagcctcagccaccatcggtaaccttgatgcttggatgtgcgggagcctcgagcaccatctgcaccttggtgcatggatgtgcgggagcatcggacaccaccggcaaactaggcccttggttgtggggagcctcggagaccatcg

SEQ ID NO: 49011 - DNA, 374 bp, Gossypium hirsutum
  Clone ID: LIB3196-059-P1-M1-A5
atcgggcggtggacagtcatggcggcccggcgcggggctctcatagtgctggagggcgtggaccgcgcggggaagagcacgcagagccgcaagctggtggaaacgctgtgcgccgcgggccaccgcgccgaactgctccggttcccggaaagatcaacggaaatcggcaaacttctgagttcctacttggaaaagaaaagtgacgtggaggatcacgcggtgcacctgcttttttctgcaaatcgctgggaacaagtgcccttaattaaggaaaagttgagccagggtgtgaccctcatcgtggacagatatgcattttctggtgtggccttcaccggtgccaaggagaatttttccctagattggggtaaaca

SEQ ID NO: 49012 - DNA, 360 bp, Gossypium hirsutum
  Clone ID: LIB3196-059-P1-M1-A6
gacccacgcgtccgcaggcatatttataggggaactccgaggagacatttgttgactacagggtggagtgctttcgtcaaccggaaaaaactcgttgccggcgactcagtcgtgttcttgagagctgagaacggcggaattcgtgtcgggatcaggcgagccaagcttgggattggggatggtgattgttacggaagtttgggtttttgtgggaattcgaaagggaacggaaaagtgaagccggaggaggttttggaggcggcgaaggcggcttccggtggccggaagccattcgaggttgcttattatccgagaacaagagggccggagttttgtgttaaggcatctgcagtgaataca

SEQ ID NO: 49013 - DNA, 219 bp, Gossypium hirsutum
  Clone ID: LIB3196-059-P1-M1-A8
atgcggcagctgcggtttcgcttcgcggggtagtgttgggcccgcggggcgcggggctcccgggcgcgcgtgcccggggtctgctgtgcagcgcgcggcccgggcagctcccgctacggacacctcaggcagtggccttgtcgtcgaagtatggcctttcccgaggccgaaaggtgatgttgtcagcgctgggcatgcttgcggcaaggggtgcggggc

SEQ ID NO: 49014 - DNA, 262 bp, Gossypium hirsutum
  Clone ID: LIB3196-059-P1-M1-A9
aatgaacttcttgatccaaacggcttcatttgctgcctcactagctgcaatatactaagcctctgttatagaatcggctactgtactttactttgaactcttccagctcacagcaccaccattaaggcaaaacacaaaacttgattgcgatcgagaatcatccttatcgatttggaagctggcatcagtttaaccttttacacttaactcttcctcacctccatatattaggaacgtatccttagttcttcttaagtactta

SEQ ID NO: 49015 - DNA, 280 bp, Gossypium hirsutum
  Clone ID: LIB3196-059-P1-M1-B1
acgctcaattcccagaaggcatcagccaatgggatggccatgtattatccaccctttcttccattaggggttctggctatagtgcgaggggtggttggacaatcgagcaaggctgctccatccattggcaatggaccttcttcggctgtgaaaaagagggcttaaagatgatccccgatcaggttcaaacgtcttctttaagagaccatgcttatacaataataagggagggattctaatcttgttgatccgcagctcaataaggatagaaagaaaaatg

SEQ ID NO: 49016 - DNA, 355 bp, Gossypium hirsutum
  unsure (1)..(355): unsure at all n locations; Clone ID: LIB3196-059-P1-M1-B10
gaaaaattacagtgaaaatgggaacccttaaagttccagctcatgtacctgccccttctgaggatgctgagcaacttcgtaaagcttttgaaggatggggtacaaatgagcaattgattatcgacattttggctcacaggaatgcagctcagcgcaatttgattcgtaaaacttatcgtgaagcttatggggaagatcttcttaagtctttggatgaggaactttcaagtgactttgagcgagctgtggtgctgtttactttggaccctgcagagcgtgatgcatttctggctcatgaagctacaaagaggttcacatcaagccattgngttctcatggaaattgcttgcactag

SEQ ID NO: 49017 - DNA, 346 bp, Gossypium hirsutum
  Clone ID: LIB3196-059-P1-M1-B11
ccatttcccatttcccctctgggatgtttctccctaaccctaagcccgtgccctcctccttttttttctcaattcgagttcacctccagcagcaatccacctccggtcctccaccgatccaagaccagacctccacggctccacccatttccagaatcagaggttaggtactctgtttttgatcgccgactcagcatccaacaaaaatcccgatctcaagtgtggggttgtttaattttgtaatgacatgtacctaggatgtctttgattgttagttgttttgtgaatgtgatgtaatttgagttataagtatatatttgtgtttgaagctaaatgttagtatgtg

SEQ ID NO: 49018 - DNA, 352 bp, Gossypium hirsutum
  Clone ID: LIB3196-059-P1-M1-B12
gagatgaggaaaatcatgggtgccaaagttcttttcttctttgctttgctttccttttcagctgtctcggcatttgcacaggatgaggaagaccaaggtcttgttatgaacttctacaaggattcttgtcctcaggctgaagacattatcaaggagcaagttaagctactgtacaagcgacacaaaaacactgctttttcttggctgagaaacattttccatgactgtgctgtccagtcatgtgatgcttcactgctgctggactccacaagaaggagcttgtctgagaaggagacagacaggagctttggcctaaggaatttcaggtacattgagaccatcaaagaagctg

SEQ ID NO: 49019 - DNA, 259 bp, Gossypium hirsutum
  Clone ID: LIB3196-059-P1-M1-B2
gtataagcaaagccatcataaggtgtgggggaggcaatgcaaccctgagtaaaaaggattatgatttcacaccatttcgcttgttaatgcttgcattatcccctagatgtgcaaaatgactaatttaaagatattttcacatgtgatttggcttgttattcaccttgcacaatttttaatgtaatggaacagttatacaaatactactgtgcaaccctgttatagacatggaatgcgactctacataattgcacttaat

SEQ ID NO: 49020 - DNA, 383 bp, Gossypium hirsutum
  Clone ID: LIB3196-059-P1-M1-B3
atgccaacaccaagttcatgttcgatctgttccaacaggtgggaaaatcacaaattaacaacaccttctattcccctatcagcatcacaacagcattagggatggtcctcttaggggccaaagacaacactgcacaacaaattaacaaggttcttcacttcgatcaagtcccagagaacaccacagaaaaagctgcaacatatcacgttgataggtcaggaaatggtcatcaccagtttcaaaagcttctgactgaattaaacaaatccactgatgcatatgagctgaagatcgccaacaagctcttcggagaaaagacgtttcaatttttacaggaatatttaaatgccatcaagaaattttaccagaccagtgtggaatct

SEQ ID NO: 49021 - DNA, 295 bp, Gossypium hirsutum
  Clone ID: LIB3196-059-P1-M1-B4
tcctacgcgtccagcttgatctcacttacgtaggggtccattttccatatagtccatccatcatctctcaagatcataactttaaaactttaaatatctatcacggccaacaaccccactgcgcaataccattacaaggttgttgatctaacaaatcataacatttcatctttactcgggcatgctcatatgatgttaatacctaaggaaatgttaaccaccaaaatcaaaagcctcttactcaactaaacacgacccacatacgctctatgcagcatgttcatctacctacatt

SEQ ID NO: 49022 - DNA, 354 bp, Gossypium hirsutum
  Clone ID: LIB3196-059-P1-M1-B5
aaaaaataaagagagagagctctaaaggtctctcagagctccggccagtggccgtcctggctcgtctcggagcaccaccggcttcggccatacgcgcttcacgcgccaccgtctgaaccaccgtgcccggcgggtagggctttaaaattttctttttctctcacgaatcaacaggtttatacacgatgattgcgacggaggtgagggcatgctgattcaggcctttgattgcggcgcaacatgaggttgatgtcggctggaagcttacggcgcgaaccctagctagggtttctcagaagctgaaactccttaagttaggtgggcctgctgggctgtgtttgtttgttggatcaa

SEQ ID NO: 49023 - DNA, 358 bp, Gossypium hirsutum
  Clone ID: LIB3196-059-P1-M1-B6
cagttcccttgattggaaatttggtatggtaaaggtgaaacacttctattatcgtattcctttatttattccttttttcttcctcctccaagctgatatactggcgaaaaaactacgcatactctatgttatcatgtgccaattggaatatacttttagcagcatttttagtgagttttcatgggatagatccaacaaaaaactggtttccctgctcttttgttcttattgtatgatgtttacgtgtactcactgaatagataacttttttcttcaactttttctggtggatcgccatctatatttatgcttcaatgcaattagtttttttgggtagcttttaattgattgatgaaca

SEQ ID NO: 49024 - DNA, 214 bp, Gossypium hirsutum
  Clone ID: LIB3196-059-P1-M1-B7
atgctctctacacttgtctgcccactaaaccatcgtgctgaggcttgaagagacactatgcacccaaaacacactattctacatcatgcacatcataactagggacaagaaactaagcatatcatcgctcatcgacaaaagcataaagactctatatagaatgatactgccatagaactacatgccaaattctcaacaccttatgatacttcac

SEQ ID NO: 49025 - DNA, 371 bp, Gossypium hirsutum
  Clone ID: LIB3196-059-P1-M1-B8
atcgggagtgggatcgcagttcttgtttgtgtgtgggtgggatcgccacttgacaatgcagatcttcgtgaagaccctgactggcaagaccatcacccttgaggttgagcccagtgacaccattgagaatgtcaaggcaaagatccaagataaggaaggcattcctcccgaccagcagaggctgatctttgccggaaagcagctggaagatgggcgcaccctgtctgactacaacatccagaaagagtccaccctgcacctcgtgctccgactcagaggtgggatgcacatcttcgtgaagaccctgactggcaagaccatcaccctcgaggtcgagcccagtgacaccatctataacgtcaaagcaaaga

SEQ ID NO: 49026 - DNA, 338 bp, Gossypium hirsutum
  Clone ID: LIB3196-059-P1-M1-B9
atggaaacaaatcttaagttggtcgtttaagacttcagtgtgcttaaatagagcaggtggattataagcaatatttttataatttgttttttgttttcttccttctgtttatgactaaataatacttttaaaaatgatgatctcttgtttggagtttttaaaaaaaattgtatgacaatggattgctcatttataatgtgtgtgttgtccttggaaaacaagatgacagttatacatttttaagaaaattaaaataaaggagaagagaaaccaggatgaccataaaataaactattgtttataaaatatctaatgcattatttttaaaatctttcaac

SEQ ID NO: 49027 - DNA, 389 bp, Gossypium hirsutum
  Clone ID: LIB3196-059-P1-M1-C1
atgtggaatggagattcagttttcatttggttcattaattctataaggtcataaaacaggtaatataaaaagcttccatgattctatttatatgtacattagaaggaacttccaggtgttactgtaattcctcaatgtattgtttcgacagcactaatttaatgctgatatactctagatgaagttttacattgttgagctatcgctgttctcttgggaactgaactcactttcctcttgaggctttggatttgacattgcatttgactttttacatagtaattgacatgtgccagggcaatgatgaatgagaatctacccccaggtccaagcattctgagcaactcttgattatccataaagagtcaaatggtaggcatttcctatca

SEQ ID NO: 49028 - DNA, 348 bp, Gossypium hirsutum
  Clone ID: LIB3196-059-P1-M1-C10
cccacgcgtccggacagagcgtgttcttgctgcttgctacaaggctttgaatgatcaccatgtcatgctagaaggtactcttttgaagcctaacatggtgacccctggttccgactccccgaaggttgccccagaggttattgctgagtacactgtccgtgccttgcagcgtaccgtccctgctgcagtccctgctattgtgttcttgtctggtgggcaaagtgaggaggaggctacccttaaccttaatgccatgaacaagctccagaccaagaaaccatggtcactctcattctcatttggacgtgcccttcagcagagcactctcaaggcctgggctggaaagga

SEQ ID NO: 49029 - DNA, 357 bp, Gossypium hirsutum
  Clone ID: LIB3196-059-P1-M1-C11
agccttagacatgtgtgggatcaagtcgataacacgggaactgtaaccccattcgttgtcataccaagtcacaagcttaacaaagttgtcattcaaagcaattccagccttggcatcaaaaatgcttgacctgttgtctccgatgaagtcagttgagactaaatcttcgtctacataaccaagaattcccttcaagttgccttcagattccgccttgatagcagccttaattgagtgagtgattgtgcttggtgtatccaagctttagcaattttaatttagaagagatgttatgagagaataaacgaattgtacggagcatatttttgtgtgaagaagggttgtttcagttttatt

SEQ ID NO: 49030 - DNA, 349 bp, Gossypium hirsutum
  Clone ID: LIB3196-059-P1-M1-C12
cagaattagggtttcggtgacggtaaccccagcataggccctacaactccgacatcatttgggtccctttgtccttcaattagatcacagcttttcgttcaaaaatatattctcttggtattggtcttaatttcaagcaacaatggcggagcacttggcctcaatctttggtacggagaaggaccgcgtgaattgccccttctatttcaagattggagcatgccggcacggggacaggtgttcacggctccacaaccgggcgacgatctctccgactctgctcctttccaacatgtaccagcgcccggacatgatcactcccggagtggatgcccagggccaggccatc

SEQ ID NO: 49031 - DNA, 372 bp, Gossypium hirsutum
  Clone ID: LIB3196-059-P1-M1-C2
cccacgcgtccggccgcagctgggttgttttaaactctaaatataaaggaggccaaacatgccgcctcgtagataccaatttgggagggctgatgaggccactcatcccgactccatgagagccaccttggctgaattcctctccactatcattttcgtctttgccggcgaaggctcaattcttgctcttgacaagatgtacaaggatacgagtgcgacgcctgcaagactggtgatgatagcacttgcgcatgggttgtctctgtttgcagctgtggcatccagtgtaaacgtatctggtggccatgtgaatccagcagtcaccttcggtgccttgctctgtggaaggatctctctcgttcgggcgctgta

SEQ ID NO: 49032 - DNA, 346 bp, Gossypium hirsutum
  Clone ID: LIB3196-059-P1-M1-C3
cggacgcgtgggcggacgcgtggggggaaatagaatcatttggaaatggatgtaggtttccaaaaataaaaatggaaatttccaatcctatatagattgcttaaaaatgatcagaagaatgagtttatgtttttggactatttcgaagcccaaaaatgaaaataaatattgaacatattttgtcgaaattttaccaggggcaaaatcatcaaaattttatcgatggtaaaatcgtcaaaattttgttagggtaaagtagaaatgagaaaattgttttatatataaatattaaagtttattttggaaaataaaaaaattggatcgagttgaatctcgttatagagta

SEQ ID NO: 49033 - DNA, 333 bp, Gossypium hirsutum
  Clone ID: LIB3196-059-P1-M1-C4
ggttggggcttacttttttttctaatttttatcttttcttttgtcttactttttcttttttaaataattaagctgaagctgaaaaaaataataaggctagtgatgggtcacctaagtctgaacctctagctggaagggtattgtctttaagtgacatactctatcgcacagaaggtaacagtgatgcttcacaagatgggccaagatccgatagggaagattctgattatgatgaagagctggaattagattttgaaacttcaatatctggcgatgaaggccatgatgttgaatccaatatgctacatggaaggttaaatcttagaattcatc

SEQ ID NO: 49034 - DNA, 358 bp, Gossypium hirsutum
  Clone ID: LIB3196-059-P1-M1-C5
cctccacctcgtcctccgtctgggcgggggcatgcagatcttcgtgaaaaccttgactggcaagaccatcaccttagaggtggagagttcggacaccatcgacaatgtaaaggcgaagattcaagacaaggaagggatcccaccagaccaacaacgtttgatctttgcagggaagcagcttgaggatgggaggaccttggctgattataacatccagaaggaatcgacccttcaccttgttttgaggcttcgtggaggcatgcagattttcgttaagacattgactgggaaaacaatcacattggaggtggaaagttcggatacaattgataatgtgaaggcgaagattcaggacaag

SEQ ID NO: 49035 - DNA, 218 bp, Gossypium hirsutum
  Clone ID: LIB3196-059-P1-M1-C6
ggaacagttacgttcgtgacacgatggaaacaaagagtcatacaatgtagttcctggagttgtagtaagaattccagcaggaagcactgtgtacttggccaaccaagacaacagggaaaagctaaccatagcagtgctccaccgacctgtcaataaccctggacaattccagaaattctttcctggtggacagggaaattctcagtcatacttaccaa

SEQ ID NO: 49036 - DNA, 363 bp, Gossypium hirsutum
  Clone ID: LIB3196-059-P1-M1-C7
cccacgcgtccggcaacaaatgctagaagcaaggtcttaagcaggctacaaaacatgactggtttagccacattgtatgacttcacaaagaaaatcccttaccagacagaatttgctgtcaggtttcttaacatagctgaggtaaagagagcattaggagtgaatgaatccatggttttcgaggagtgcagcgatgttgttggggatgtattgcatgaagatgtgatgaagagcgtgaagtacatggtggagttcttggtgaagaatagcaaggtactgttgtatcaagggcaatatgatttaagggatggtgtggtatcaacagaggcatgggtgaagaccatgaaatgggaagggattgag

SEQ ID NO: 49037 - DNA, 386 bp, Gossypium hirsutum
  Clone ID: LIB3196-059-P1-M1-C8
ataacttgggaagggttgtctggaagaaaacatacaggggttgcttttggaatgaatatatcagggatcctgattttatcattaaaggggaagatatgttgggaggggttatgaaaggcctacgtcaagttctgttctggaatccagctgcttgggaggcttgggtgggagtatcacttaagtcaggagttggaggcagtaagctatgactgagccacggcactccaggccggacaacagagtgagaccctgtctcaaaaaaaaaaaaaatctaatccctctttccttcccccaccacaccgactgctgagtcagctggtccatcctccaagagcaacggagaggtggggaccgtgatagggtcacagcaagggctcacaggctgc

SEQ ID NO: 49038 - DNA, 367 bp, Gossypium hirsutum
  Clone ID: LIB3196-059-P1-M1-C9
attaccatcattaaccatttgaacccataccgatacaatcaaccaaaacaatcataaaacatattcattacttaccacttagtaaccggacctgttaagttaatataccatcatccatcactctaattatactacatttcatatttctaaaatgagctaactattaaaatgaataccaaaaccaaactcattaaacattttaattaagaacatgtaaaaccaaacttaagcataataagcaagtcattttcgcatggctttacatacatactcattcaaaataattaactccaagactagcctatacatgccatataaccgagtctcaaaatattatttactgaaatgttaacaggatagtgtgatg

SEQ ID NO: 49039 - DNA, 362 bp, Gossypium hirsutum
  unsure (1)..(362): unsure at all n locations; Clone ID: LIB3196-059-P1-M1-D1
gaaatacacaagaaaaaaaaaaaaaaaacaagtgagcagataaattgaagacttttatttctgttaacatccattatgagtactgctggtcaagtcatccgttgcaaagctgcggtagcatgggagtcggggaagccactgtcaatagaggaagtggaagtggcaccaccgcagaaggatgaagtccgtattaagatactcttcacttctttatgtcacaccgatgtctacttctgggatgctaagggacaaaaccctctgtttcctcgcatactaggtcatgaagctggagggattgtggagagtgtangtgagggggtgactgatctaaagccaggtgatcatgttctccccatcttcac

SEQ ID NO: 49040 - DNA, 373 bp, Gossypium hirsutum
  Clone ID: LIB3196-059-P1-M1-D10
atgtcaccgtcaaccagagtctcctgactcccctggacctgcaaatcgaccccaccatccagcgagtgcgggccgaggaacgtgaacagatcaagaccctcaacaacaagttcgcctccttcatcgacaaggtgcggttcctggagcagcagaacaaggttctggaaaccaagtggaccctgctgcaggagcagggcaccaagaccgtgaggcagaacctggagccgttgttcgagcagtacatcaacaacctcaggaggcagctggacagcatcgttggggaacggggccgcctggactcggagctcataggcatgcatgacctggtggaggacttcaagaacaaatatgaggatgaaatcaacaagcgcac

SEQ ID NO: 49041 - DNA, 356 bp, Gossypium hirsutum
  Clone ID: LIB3196-059-P1-M1-D11
cccacgcgtccggggagaacgaatttactaggttcatgctgccatttatgaacttacatgccattaaagtgtttaattatgaagatacatgttccatacaagtgcatgaacgtcccaaggagatgaatgcaaccttttggtgcacatacaagtcatttgaagcctttctttatgactaagcattcatgcacaaaccaagggggaagaaagtgtccattcagctagtgcatgaatctgccgaatttatgaactattttaatacattagtgtgaacgtttttattattgtgtgaacacctagatgtcgaatttgaatggtcatctatatgcctataaatatttattttctttcatttg

SEQ ID NO: 49042 - DNA, 162 bp, Gossypium hirsutum
  Clone ID: LIB3196-059-P1-M1-D12
aaggggaggggaccattttttgtcgatcgctaaaaacaacaagtttacatctccgatactggtatatttagcaaaatctattttacttataaaaatgcttgaacaaaaaagaaaaactaacctttattccccttttgggagcctgcacttatatataattcc

SEQ ID NO: 49043 - DNA, 362 bp, Gossypium hirsutum
  Clone ID: LIB3196-059-P1-M1-D2
cttcttcgcggtgatctcgaggccatggctgttgttgagaatgcttcgaatcaagacacggcggctgcaacagtgacgtcaaacgaccaagatcagtcaaagcttcggtcaacaaccgatctgagcttacacgacaacgagcaagggttgtacaacaagatcggtggaaccaacggtggtggtggtaaagatgagcatggggatagtttcaaaagagatatgagagagttacaagaactgttctctaagcttaaccccatggctgaagagtttgtacctcactcgcttgttaacaatggactcaatggtgggtttcacactaacaatattgcttttcaaaacaacaataacaacatctcaag

SEQ ID NO: 49044 - DNA, 371 bp, Gossypium hirsutum
  Clone ID: LIB3196-059-P1-M1-D3
cggacgcgtggggttttgtgggcccgggaccactttgcgactagggtcacattaggggtgtcacaaattgtcccaaatacttgaacgcatcgtttaagaatggattaaattaaaacagcgcataaattttaggaaaaatttaaaacactacaaaagaaatataaataggacttaatcagatggcggcaaacctgggagggaccgaatgcgcaaatataccttcaccgcagaaacacgcggatcctgagggcatcggatcgggtcatcgggttgtgccgtgaaacgacgccattttaaacatatatataaactaaaatttgccctaaaaaatcatttggctgattatttctttaaaaaaaaaccttaaactt

SEQ ID NO: 49045 - DNA, 363 bp, Gossypium hirsutum
  Clone ID: LIB3196-059-P1-M1-D4
atcgtccctctgttttctctacgtttggaagatctcttgtgacgatggcccaagcagatcagattagcaacagccctgaaatcaaagagccatccccgaaaggcccaaaactcggtcaaaatggagtacatgaagttacccatggtccagcctccctcttgaaaggcaaaaagctttctgaaaaagccgtgttgccgtcaagaggctctcctctcgccgctggctacgatctgtcaagtgcaacggatacaaaggtgccagccagaggaaaagcgttgattcccactgatctaagcattgctatccctgaaggaacatatggtcgcgttgcgccaagggctggtttggcttggaagcattcca

SEQ ID NO: 49046 - DNA, 355 bp, Gossypium hirsutum
  Clone ID: LIB3196-059-P1-M1-D5
taacgagctgaagccgtgctacgataacactagtgttttcacaataaattaatcatagctgcagcttgtttcttttaaactctaaatataaaggaggccaaacatgccgcctcgtagataccaatttgggagggctgatgaggccactcatcccgactccatgagagccaccttggctgaattcctctccactatcattttcgtctttgccggcgaaggctcaattcttgctcttgacaagatgtacaaggatacgagtgcgacgcctgcaagactggtgatgatagcacttgcgcatgggttgtctctgtttgcagctgtggcatctagtgtaaacgtatctggtggccatgtg

SEQ ID NO: 49047 - DNA, 360 bp, Gossypium hirsutum
  Clone ID: LIB3196-059-P1-M1-D6
cgattagcttcccactataacgcttatggccccatttactccgatcgcgagaggctacaagtttacatctccgatactggtatatttgcggtaatttatgtactttataagattgctgcaacaaaagggctggcttggcttttatgcacttatggggtgcctctacttattgtgaatgccttccttgtgttgatcacctacttgcaacatactcactcggcattgccgcattatgactcgtccgaatgggattggttgcgaggagcattgtcgacgatggatcgagatttcggggtgttgaacaaagtgttccataacatcaccgatacgcatgttgctcatcacctcttcttaacgatg

SEQ ID NO: 49048 - DNA, 365 bp, Gossypium hirsutum
  Clone ID: LIB3196-059-P1-M1-D8
gcagaagcagggccgtcagcaggtgttagtgaggatgggcgaacagagagaagaaagggaaatgagtgagaagcaattggctgatgaagtttgtgatgatcgtgaagatggtgatgatgatgatgataaggaagatggtgctggagctttggctggttttgtacctggtccgctcctttctctcaaggagcagattgagaaagacaaggatgatgacagcttaaggagatggaaggagaagcttcttggttgtgttgaagaagacctaaatggccaaatggaacctgaagtcaagtttcactcaataggaattatttcgaatgaccttgaggaagtttcttatccattgccattggatttgaatc

SEQ ID NO: 49049 - DNA, 361 bp, Gossypium hirsutum
  Clone ID: LIB3196-059-P1-M1-D9
gtgaaccagaggaagagaaacgaaagaaaatggcactcctttgtgcttcaacctcagtcatcttctcttcttcttcttcttcagagaggccttcctttgcttcattgaaaaggactagtcccagtaaccaaagctcatttcttgggttcttccctgtagtggcattgtccaaaccttcttatgctcggacaacaaccttgtctttctccaaacgggatttcaaggtttgctgccgggacctatctcttgtccctgaaaaccaacgttggatgttcgaggaatccgaggctgatggccctgacatttggaacaacacatggtatcccaaagctaaagaccacattaataatgaaaaaacatg

SEQ ID NO: 49050 - DNA, 390 bp, Gossypium hirsutum
  Clone ID: LIB3196-059-P1-M1-E1
atctccggaatcactgcagcccccccctcgccccgagccagagcggcccgggtcccgccaggccctcacactcccagcagaatgggcaaggagaagacccacatcaacatcgtggtcattggccatgtggactctggcaagtccaccaccacgggccacctcatctacaagtgcgggggcatcgacaaaaggaccatcgagaagttcgagaaggaggcagctgagatggggaagggatccttcaagtatgcctgggtgctggacaagctgaatgcggagcgtgagcgcggcatcaccatcgacatctccctctggaagttcgagaccaccaagtactacatcaccatcatcgatgcccccggccaccgtgacttcatcaagaacatgatc

SEQ ID NO: 49051 - DNA, 358 bp, Gossypium hirsutum
  Clone ID: LIB3196-059-P1-M1-E10
cggacgcgtgggccttgcacagggatgccagaagtactatgaagctggtgcccgctttgctaaatggcgtgctgtccttaagattagtgctaatgagccaaccgagcttgcaatccaagaaaatgccaacgggctagctatgtatgctgccatctgccagcaatgtggccttgtccccattgttgagcctgaaattcttgttgacggatcacatgacattaaaaagtgtgctgcggtgacagagcgtgttcttgctgcttgctacaaggctttgaatgatcaccatgtcatgctagaaggtactcttttgaagcctaacatggtgacccctggttccgactccccgaaggttgcccca

SEQ ID NO: 49052 - DNA, 380 bp, Gossypium hirsutum
  Clone ID: LIB3196-059-P1-M1-E11
atacaagctccagcagctggcccttcacatccagacttggctgagaggacccacccctgggtgtccggtggtcagtcgccccaggatggggactacagtcagagcagccttggtcttggcctatttggccattgcttctgctgcctctgagggaggcttcaaggctacagggcagaggcagctgaggccagagcactttcaagaagttggctacgcagctcccccctccccacccctatcccgaagcctcctcatggatcaccctgacagctctcagcatgggcctccctttgagggacagagtcaagtgcagcctcctccctctcaggaggccacccctatccaacaggaagagctgatgcctgcccaactgcctgctg

SEQ ID NO: 49053 - DNA, 369 bp, Gossypium hirsutum
  unsure (1)..(369): unsure at all n locations; Clone ID: LIB3196-059-P1-M1-E2
cggacgcgtgggtttgtctaagggctgggatacccgaattgctgtttctctcccccccccacaaaaaaaaaaactccaaatctaaagagagactttcctctcctccgatcctttattcgtcttggtttatgagctcgaaggagaaacccactctcggtggtacgcggattaagacccgcaaacggaatattgctgcgcctctggaccctgcagcatttgctgatgcagttgtccagatctatttggataatgctggtgatctggaacttgttgccaagaaccttgaatcttctgatcttaacttctcaagatacggtgacactttctttgaggttggtttcaccgggggccgnacacaaccaggcacaa

SEQ ID NO: 49054 - DNA, 364 bp, Gossypium hirsutum
  Clone ID: LIB3196-059-P1-M1-E4
cccacgcgtccgcgataaacaaggcaaaggacccttcctcgaagcttccatagaacaaatcgaggccatgagtagccatgaggaaggcagcaaaggcggtggtttgtggccatttggaagtgagtcaaaatcaaagagtgcattcaacctcttcagaaagcgtgagccttcacattgtaacagatatggtcagctctttgaagttgaagaagatgaattcaagcgccttaaagacttcgatctcagggtctcctatgccaacatcaccaagggatgtatgtcagccccattctacaactcaagggcaataaagatagccattgttgtgaaaggtgaaggatactttgaaatggtatcacctcct

SEQ ID NO: 49055 - DNA, 368 bp, Gossypium hirsutum
  Clone ID: LIB3196-059-P1-M1-E5
ataccaagtctccagtcttgcctttgcacacctgttcagaagatggggaattcattgaatagagtcacctgacgctctccttgataattttccttttattattccaggcatcattctgtctgctgcttccccatctatgacaatttaaatccaattattctttctttaatacttaattcaaatggcaccaccactccaaaagccttctctgatcaccactccaccttcctatggcagatttaacaattaccttatatcatggggacccgtaatagtgggtgagaagagaccatatgagtggcgttttcatcttcacctcaacttcaaccagggctgcctggcttttggctggttaaaattttgggatc

SEQ ID NO: 49056 - DNA, 383 bp, Gossypium hirsutum
  Clone ID: LIB3196-059-P1-M1-E6
atatgaaattgagaaaactggaggagcgcttttatcaaatgacgggtgaagcctggaaattaagcagtggtcacaaacttgggggtgatgaaggtacaagtcagtcatcttttgaaacatcaaatagagaagcagcaaagagccagaacttgcctaaacctttaactgaatttccatctcctgctgtacagcccacatgcaaggagattcctgatttacctgaagaaccttctcaaacagcagaagaagtagttactgttgctctccgatgtcccagtgggaatgtcctgaggagaaggtttttgaagtcctgcagctcacaggtcttacttgactggatgatgagaattgggtaccacacatctctatacagcctttctact

SEQ ID NO: 49057 - DNA, 370 bp, Gossypium hirsutum
  Clone ID: LIB3196-059-P1-M1-E7
atgccaccctccctggccatgcgggcatcagcccagaagtgttggcctgactcagtcagctgagctaaggacacacaatttcaagaagggtctgctgcattgctgcctgaagtgttctagttactcacgtagagaccacactctgcacagaaagacgccttcagtaattgctttactcaatgtactttgtttagtgtttgactaaaaatataattaatttccttcagtttatactatttcataatatttatgtttaagcccttgtaaagtataaactttcaaacttgtgagacagcaaagatctctatcatttgaaagctagaaatcactgtgatcacaattgatttagaaaattaaatgcactagagac

SEQ ID NO: 49058 - DNA, 378 bp, Gossypium hirsutum
  Clone ID: LIB3196-059-P1-M1-E8
atgtcccgctgcggggagatgctccacatccgccgaccgggtgctccgccaggcgctggccgaatgcctggggaccctcatcctcgtgatgtttggctgtggctccgtggcccaggttgtgctcagccggggcacccatggtggtttcctcaccatcaacctggcctttggctttgctgtcactctgggcatcctcattgctggccaggtctctggggcccacctgaaccctgccgtgacctttgccatgtgcttcctggctcgtgagccctggatcaagctgcccgtctataccctggcacagacgctgggagccttcttgggtgctggaatcgtttttgggttgtattatgatgcaatctggggctttgccgacaa

SEQ ID NO: 49059 - DNA, 380 bp, Gossypium hirsutum
  unsure (1)..(380): unsure at all n locations; Clone ID: LIB3196-059-P1-M1-E9
atgtcatcaatgggggtgtccctgagaccacngagctggggaaggagaggttcgaccacatcctgtacacgggcagcacgggcgtagggaagatcgtcatgacggctgctgcccagcacctgacccctgtcacgctggagctgggagggaagagcccctgctacgtggacaagaactgtggcctggacgtggcctgccgacgcatcgcctgggggaaattcatgaacagtggccagacctgcgtggcccccgactacatcctctgtgacccctcgatccagaaccaaattgtggagaaactcaagaagtcactgaaagagttctatggggaagatgccaagaagtcccgggactatggaagaatcattagtgcgcggcac

SEQ ID NO: 49060 - DNA, 359 bp, Gossypium hirsutum
  Clone ID: LIB3196-059-P1-M1-F1
ctctctctcctatactcaactggttggacttaaaagcaaggtagctagctagggttttgtgagccagagagatgggttcaaaaagaacggcatcactagccctcttctttgcactcaacatcctcttcttttccctggtgagtgcttgtggttcctgcccttcccccaaccccaaacctaaacctaaaccaaagccaaaccccactccctccccatcttcttctggcaagtgccctagagatgctcttaaactcggtgtatgtgctgatttgctcggtggcttgctcaacgtcaccattggtacgcctcctgttcaaccctgctgctctctcatccaaggtcttgctgatcttgaagct

SEQ ID NO: 49061 - DNA, 362 bp, Gossypium hirsutum
  Clone ID: LIB3196-059-P1-M1-F10
cggacgcgtgggctaggacacgggttaagttttttaatggacgtggatgaaaaaaaacatatttatataaagttggttaaattaaaatttaaaatttgtatttggttggagtattattttattaaaaaatataagataaaaatattctcctattaatatttcttatttttttatataaaagagtattttaataattgttcaactgagttgatattcaattaacttatgacactattttaattaaaaatttaatataaaattaaatttaacaatatcattaaaaggtgctacaatatcacacaaaataaaacttttaactaccaaaacacagatatattacaattgggacacatactaaaaag

SEQ ID NO: 49062 - DNA, 318 bp, Gossypium hirsutum
  Clone ID: LIB3196-059-P1-M1-F11
cggacgcgtggggcataatcatacatagtgcgcgcagtaggattctgattaacagcaatcgcaggaggtagcagattttcttggtttttagccatctcctcggttgtggttgaagtatcgtcctcttgctcgttctctatgtatcttaagcttcactttatttctctctggtttctgcgaactgtgcgatcgatttcttcgtcaaaaagtagtggtcctgacaggtttcttctagtcataaactataaaaacctgccaagagaaaaaaaaagtaaattaataaatagtaacacaaataaaataaaattaacttgcaag

SEQ ID NO: 49063 - DNA, 360 bp, Gossypium hirsutum
  Clone ID: LIB3196-059-P1-M1-F12
aaatcccctctcccattgatcttttgatcttctagacacttctcttcctcgttgtgagtctcttggtttgccctggtaatggcgtctgctttagaaaccaaagccaaagaagcatacttcgatgaccactttgaactcgccctcgatctgtactcgcaagccatcggaatcaaccctaaaaaggccgagctctacgctgaccgtgctcaagccaacatcaaactgaacaatctccctgatgctgtggcagatgctaacaaagcaattgagttggatccgtccatgtctaaagcctacttgcgtaaagctactgcgtgtatgaagcttgaggagtatcaaactgctaaggctgcgttggag

SEQ ID NO: 49064 - DNA, 367 bp, Gossypium hirsutum
  unsure (1)..(367): unsure at all n locations; Clone ID: LIB3196-059-P1-M1-F2
ggccatccagtcacattcgttgcctgggaaaacgaggacctaggattgctcggnttcggactctacaacggccaagacaacaagaggatcttcgtggctgggaaaaccaacaatgtgagacaatgggatcgccaggccaaggagctggcgtttggggtggagtcaaggttggtggatgaggtattcaacaacaacccgcaagaatcttacttcgtgtctggacagagtcggcgtggatttgatgagaggaggggaagtaataaccccttatcgccgttcctggactttgcacgcttgttctaagtagtagttttgtaaggcatgtaatggtggaataaaataagggtggcctatgtaaagaggaagg

SEQ ID NO: 49065 - DNA, 384 bp, Gossypium hirsutum
  Clone ID: LIB3196-059-P1-M1-F3
atcaaaaaagggccagaatggataggaaaggactcccaaaatctgagcataccagccgcttaaggagaaatgttgctagacaaccatagttgaggttagaaagaggaaagaaggaagagttagtgggctagagaggggaaggatgtgatttgagcagatagttctcattctcctctgtccagagtacctgaactatgaggatgggaaattctctaagagccggggtgtgggagtgtttggggacatggcccaggacacggggatccctgccgacatctggcgcttctatctgctgtacattcggcctgagggccaggacagtgctttctcctggacggacctgctgctgaagaataattctgagctgcttaacaacctgggcaa

SEQ ID NO: 49066 - DNA, 342 bp, Gossypium hirsutum
  Clone ID: LIB3196-059-P1-M1-F4
cccacgcgtccgaatcctcccggactacatcccacctggaactgaccttatttttagtttctccgattgacttgaattttcaccatgagagctgatcatccattaaaagccgtgactttagcccatgtcaggtatcaaagaggtgatcaactcggccatttcttagactgggtttcgttagtccctgttttcatttcccttggtggctttgtttctcatttctacttccgtagagagcttcaaggaatgttctttggattagggcttttaatatctcacttcattaatgaactgatcaagaaatccggtcaacaagccaagcctgaagcctgtgcgctatta

SEQ ID NO: 49067 - DNA, 378 bp, Gossypium hirsutum
  unsure (1)..(378): unsure at all n locations; Clone ID: LIB3196-059-P1-M1-F5
atgggccctcttgcttctctgatagctcccagcttactcgtgtggggcatgattggcgggcaggantgtttcctatgcgggcctcggggcttcagctgtggctcagccatcgtaggcagtggcaagagaggggccttcagctcagtctccgtgtctgaaggtgctggccgatgctcttctgggggctttggcagcaggagcctctacaacctcgggggggacaagagcatctccatgagtgtggctgggtcacgacaaggcgcctgctttggaggtgctggaggcttctgcactggtggctttggcggtggggttgggggctccttcagcggtaagggtggccctggcttccctgtctggcctggtggggggattcag

SEQ ID NO: 49068 - DNA, 350 bp, Gossypium hirsutum
  Clone ID: LIB3196-059-P1-M1-F6
gaaaaaaaagaatggtgcccagcagccggcttcgatcaactctcaaaacccagcttggttcatatataaaaaatgctgctgcgtacagaagttctatggaccacccacttaagggtgcattactggcaagattatatagtaccgagccatctttgcagagagatgattcagatttaaaggatggcaatgggtttaaggggcatgatatgctggctccattcacagctgggtggcagaccactgacttacatcccctggttattgaaaagtctgagggaagctatgtttatgatacccatgggaaaaagtatctggattctctcgctggtctatggtgtacagcattagga

SEQ ID NO: 49069 - DNA, 362 bp, Gossypium hirsutum
  Clone ID: LIB3196-059-P1-M1-F7
gaaaaaaagatgggaaaatcaggctactcaaagcttcacatcgccatgtttccctgggttgcatatggtcatttcatccccttccttcatctctcaaataagttggctcataaaggccataaaatttccttcattttgcctaaaggagtgcaaccaaagctggaaaacatgaaccaataccccaacttgattcaattcgtccctctagttataccccatgtcgatggcctccctccaggtgctgaaactacatctgttgttcctctgaaccaacaaaaataccttgcttttgctgtagatcaaaccagggaccaagttgaaggcatcctaggggctttaaaacctgatatggttttttatga

SEQ ID NO: 49070 - DNA, 376 bp, Gossypium hirsutum
  Clone ID: LIB3196-059-P1-M1-F9
atcggcgcgatccgcatgagcctagatagcgcgggactagggtgcagagctcgggacgtggatcggagccggcgcgatgggcggagagcaggaggaggagcggttcgacggcatgttgctggccatggctcagcagcacgagggcggcgtgcaggagcttgtgaacaccttcttcagcttccttcgacgcaaaacagactttttcattggaggagaagaggggatggcagagaagcttatcacccagactttcagccaccacaatcagctggcacagaagacccggcgggagaagagagcccggcaggaggcctagcggcgggagaaggcatagcgggcggccaggctggccaaggaagccaagtcagagacctca

SEQ ID NO: 49071 - DNA, 385 bp, Gossypium hirsutum
  Clone ID: LIB3196-059-P1-M1-G1
atccggacgccggagcccgagccccgccgagtcccctcgcctcatgcgcccgcgtgcgatccgcgctcctccgtcccaccatggctcggggccccggcctcgcgccgacaccgcttcggctcccactgctgctgctgctgctggcggcggtgaccggccacactggcgcacaggacaactgcacgtgtcccaccaacaagatgaccgtgtgcagccccgacggtccctgtggccgatgccagtgccgcgcgctgggctcaagcgtggcagtcgactgctccacgctgacctccaagtgtctgctgctcaaggcgcgcatgagcgcccccaagaacgcccgcacgctggtgcggccgaatgagcacgcgctcgtggacaacgatgg

SEQ ID NO: 49072 - DNA, 361 bp, Gossypium hirsutum
  Clone ID: LIB3196-059-P1-M1-G11
gagagattttgatggggcttggcggcgtctacgaggcggtgataccgtacaatctgaacggcgaatccaattggtggcacgacattaacgattcaccgctctggcaggaccgcatttttcacattctcaccgccctttatggcctcgtcgccgtcattgctctcgttcaattggtacggatacaattgagagttcccgaattcggttggaccacgcagaaggtcttccattttctaaattttcttgtgaatggggttcgtgggctagtttttattttcaggcggaatgtgcaggacttacatccagagatcgttcgacacatcttgctggacatgccaagtctagtgttcttcacgacata

SEQ ID NO: 49073 - DNA, 289 bp, Gossypium hirsutum
  Clone ID: LIB3196-059-P1-M1-G12
gcgagggatactccttgaactgattgagccaaacccctcgctactccaaccaaaacggccgcttttacgaggcttgccctcgtaatttccagcagcaactccgagaagtggattcctccgttggtgcgcttcgaaataaacaaaggatcgatcttcgtaccgcactacaattcaaaggctacattcgtggtcctcgtcaccgaaggaaacggccacgtcgaaatggtctgccctcacctttctaggcagagctcacactggttctcccgagaggaagaagaacaagaag

SEQ ID NO: 49074 - DNA, 360 bp, Gossypium hirsutum
  Clone ID: LIB3196-059-P1-M1-G2
ggtgaatgtgactaaaactgctaatagggcactagaacaaagtggagcaccagtagaagtgaagtatgagagcttgaagaacaacagcaagggatcaaatggggccatccttttcctagacttaaaagacggttcatcagatagtgactcaagcgctgtcttgaatgaagacaacaacaacggctcgaattacgtgggtgtatcttcatctggggttctacaaagccaacatgtttggatgtcaccgacaacagcctcttcactcaatttcaactcttcatcttcttctatgaagtgcctccaaccccagcaatttgtgaagatggaagaacaaaatttttttagtgcagatgaagcttg

SEQ ID NO: 49075 - DNA, 429 bp, Gossypium hirsutum
  Clone ID: LIB3196-059-P1-M1-G3
cactatataacaagtgtggtacgctaaagcacgctggtgcccctccccaattttcgggatgggctccaagcttgctctttcccgtcctgacttctctcagccgatgttccgatcccgatcatgaggttcctgatccacttatcgggcggattctggggtgtagacgctgcttatcagtccgccccaggcgaggttcttggcaccgacttgagagcttaaacatgtcccagggtgtgcggattagtatcccaagaaatttaaatggcgttcgcggatttttgctcacctggagtaaggatggacatacttctacaagtgtgcagcaaacaacttgctccttggaacctgagttaagaggactttttacagaacccatacttgagcaagcttttcctgaatctctcacagcatgtagatgagagtggctta

SEQ ID NO: 49076 - DNA, 369 bp, Gossypium hirsutum
  Clone ID: LIB3196-059-P1-M1-G4
attttgccgccagaacacatgtgtcgtgaaaactaccccgaaaagcgaaaatgggaaaggagaaagactcatatcaacattgtcgtcattggacacgtagattcgggcaagtccaccactactggccatctgatctacaaatgcggtggcatcgacaaaagaaccattgaaaaatttgagaaggaggctgctgagatgggaaagggctccttcaagtatgcctgggtcttggataaactgaaagctgagcgggaacgtggtatcaccattgatatctccttgtggaaatttgagaccagcaagtattatgtgactatcattgatgccccatgacacagagactttatcaaaaacatgattacaaggaca

SEQ ID NO: 49077 - DNA, 365 bp, Gossypium hirsutum
  Clone ID: LIB3196-059-P1-M1-G5
gtaattgtggtatatccacttagcacgacgttacacgtataaacgtggtatatccacttagcaccacgtttttccattccgaaggttcaactgagatttcctcatttaatctcaattcatcaaccacaaatcaccgtttgtttccattaattgaacaatactaaaacttatttcacatgtcacaaaataaaatattataacataataaaacaatacattatttacatataaactgtaacaccccgaacccgagaccgtcgtcggagtcgaacacgaggtgttaacagacttcaaaccacttattaaatatttcccagacaagctgccaatctgcgtactagtcactttaaaaatcatatcttgag

SEQ ID NO: 49078 - DNA, 332 bp, Gossypium hirsutum
  Clone ID: LIB3196-059-P1-M1-G6
aacttctttgcttactcttagcggtcggtcgctcgttctgtcccatggctacttcgctcagatagatctcatgactaaccatcaccaggatccacctcgggggcagcctaagcaacctcaaccacgtgaccaatcccaatgccaactccagaacttgaatgctcttcagtctaagcaccaacttacgtcagaggctggtgaaactgagttctgccaccaaaatgaggatcaattccagtgtgctaatggtgatttcctacgtgataagatccagcacaaaggacttccattgtcttcatttaccagtgctgctatgcttttctatgatgaac

SEQ ID NO: 49079 - DNA, 380 bp, Gossypium hirsutum
  Clone ID: LIB3196-059-P1-M1-G7
atcacctccagcaaaaaccttgagcccctctttgagaccgacctcagtgtcctgaggaagcaactagataccttggtcaatgacaaagggcgcctgcagtctgagctgaagaccatgcaggacagcgtggaggacttcaagaccaaatatgaagaggagatcaacaaacgcacagcagctgagaatgactttgtggtcctcaagaaggacgtggatgctgcctatatgaacaaggtggagctggaggccaaggtggacagtcttaatgatgagatcaacttcctgaaggtcctctatgatgcggagctgtcccagatgcagacccacgtcagcgacatgtgcgtggtcctctccatggacaacaaccgcaacctggacct

SEQ ID NO: 49080 - DNA, 370 bp, Gossypium hirsutum
  Clone ID: LIB3196-059-P1-M1-G8
atggccaagcaagcttctgtctgcacctgctctcaatcctgctctcaccatgagcctccggctgcagagctcctccgccagctatggaggtggttttgggggtggctcttgccagctgggaggaggccgcggtgtctctagctgttcaactcggtttgtctctgggggatcagctggaggctactgaggcggcgtgacctgtggctttggtggaggggctggtagtggctttggaggtggctacggaggtggccttggaggtggctttggtgggggttatgctggtggcttttttgattttggtgcttgtgatggcggcctcctcactggcaatgagaagatcaccatgcagaacctcaacgaccggctg

SEQ ID NO: 49081 - DNA, 359 bp, Gossypium hirsutum
  Clone ID: LIB3196-059-P1-M1-G9
cccacgcgtccgatttgaaactgcctgcttctagctctccttttgaatcaatctccatttttagttttcgtaaagtgaaaggatgttaggcattttcaagaaagaattaatgaatccaccaaaggagctgcatagcccagcttcactcacttcatcaaacaagaccaagcttcccaatcaaatcatcaaccatttcctttcttcaaatcccaacaatgctttctcaatggggttcggatcctcagcttgctttgcttatgctcccacagagaatcgtttccccaatcatcaaaggttgttctgtggagtggatgaaatatactgcatattcttgggggatttgaataatttgagcagcc

SEQ ID NO: 49082 - DNA, 366 bp, Gossypium hirsutum
  Clone ID: LIB3196-059-P1-M1-H1
atataattgaaagaaaagaaaaatggttctgctagagaaactttgggatgatgtagtggccggacctcaaccggaacgtggccttggccggctgaggaagatcacaaccaccccacccttgtccaccaaagatgaggcttcatcaatggcgatgccgacgagtccgacgacacctgggacaccgtcgacgccggtgtcggctcgtagggacaacgtgtggaggagcgtgttcaatccaggtagcaaccttgcaaccaaaggtattggcgctgaagttttcgacaagcctcaacctaactctcctactgtttatgactggctttacagcggggagacccggagcaagcatcaccgctgattgggcga

SEQ ID NO: 49083 - DNA, 215 bp, Gossypium hirsutum
  Clone ID: LIB3196-059-P1-M1-H11
tcgatcactgaagaaggcgtggatggtaacaagcaaagcgtattgtcgaaccttagaattgacgcttaaacatcagaagtatgtcgactgagaagaactatttcagtcgacatgtcctccacgaaatgtacgaatcaacatggattgatgttcctcaaaaagatagcatcatcctatgtattgctacctccttacattatcgactaatgatatgt

SEQ ID NO: 49084 - DNA, 367 bp, Gossypium hirsutum
  Clone ID: LIB3196-059-P1-M1-H12
gaagaggaacgcttacgttcttgacacatgaaaacaaagagtcttacaatgtagtaccgggagttgtagtcagagtcccagcaggaagcactgtgtacttggctaaccaagacaacaaggaaaagctaatcatagcagtgcttcaccgccctgttaataaccctggacaattcgaggaattcttcccagctggaagccaacgccctcagtcatatctccgagcctttagtcgtgaaattcttgagcctgccttcaatacacgaagtgagcagctagacgagctgtttggtgggaggcaaagccaccgaaagcagcagggacagggaatgttccgtaaagccagccaagaacaaataatggcattgag

SEQ ID NO: 49085 - DNA, 378 bp, Gossypium hirsutum
  Clone ID: LIB3196-059-P1-M1-H2
atggcgcctgctttggaggtgctggaggcttcggcactggtggctttggcggtggatttgggggctccttcagcggtaagggtggccctggcttccctgtctgccctgctgggggaattcaggaggtcactatcaaccagagcttgctgacccccctccacgtggagattgaccctgagatccaaaaagtccggacagaggagcgagaacagatcaagctcctcaacaacaagtttgcctccttcatcgacaaggtgcggttcttagagcaacagaataaggtcctggagaccaaatggaagctgctccagcagcagacgaccagcacctccagcaaaaaccttgagcccctttttgagacctacctcagtgtcctga

SEQ ID NO: 49086 - DNA, 363 bp, Gossypium hirsutum
  Clone ID: LIB3196-059-P1-M1-H3
cccacgcgtccggaagtggacaatacaagagagtgagagcccagttatcaaccggtgacatatttgtagtcccagcaggccatccagtcacattcgttgcctcccaaaacaagaacctaggattgctcgggttcggactctacaacggccaagacaacaagaggatcttcgtggctgggaaaaccaacaatgtgagacaatgggatcgccaggccaaggagctggcgtttggggtggagtcaaggttggtggatgaggtattcaacaacaacccgcaagaatcttacttcgtgtctggacagaatcggcgtggatttgatgagaggaggggaagtaataaccccttatcgtcgttcctggact

SEQ ID NO: 49087 - DNA, 366 bp, Gossypium hirsutum
  Clone ID: LIB3196-059-P1-M1-H4
atgtcctcgtggaagtgacatcgtctttaaaccctgcgtggcaatggctgacgcaccgccgtgatgcccacggaagacagggcgacctggaagtccaactacttccttaagatcatccaactattggatgattatccgaaatgtttcatcgtgggagcggacaatgtgggctccaagcagatgcagcagatccgcatgtcccttcgagggaaggccgtggtgctgatgggcaagaacaccatgatgcgcaaggccatccgagggcacctggaaaacaacccagctctggagaaactgctgcctcatatccgggggaatgtgggctttgtgttcaccaaggaggatctcactgagatcagggacatg

SEQ ID NO: 49088 - DNA, 372 bp, Gossypium hirsutum
  Clone ID: LIB3196-059-P1-M1-H5
acggtaaaactatgtgaagaaatggactctgagaggactacagaagtttatttcagataatcgtaagaaccttgctgctctgaaagaggaaattccttgggcgttgaaagctgcagcaagtccagctcgcttggtcctggaatcgttggaaggattttacccttcagaagttgatggaaagaaagatgcaaacctattggggcttaggcgaacttgtattatgttgatggaatgtcttagtgtcttgctttctaatctggatatggtttctgttttggctttgatctctgaagatattaaggaacaagcaaacctaattgccgaggaatggaaaccaaagctggatgctcttgacatggatgcgagtaatgg

SEQ ID NO: 49089 - DNA, 379 bp, Gossypium hirsutum
  Clone ID: LIB3196-059-P1-M1-H7
atgacaccctcaagcacgagctcccctccttcccctctggaggacagtgccaaagcaagtcccccttctcatttcctcactcagatacgttctttcttgctttgaggctcccccttggtgtgcactagagaacctgggtaaggaccaacaaatcactaggcagttccatccaggtgtgtccctaaatagcatgcgttcatgactctggctcactttatttttggccccaggtcaggtctcccaaagggtttcccagcagtcacttcagagtctcctgcagagtcaccatcaagcagacctcttccttgggaggccgtgtcgtcgccccaacccttgacttctggtatcaccatctcctgtcacctgggctccagtctct

SEQ ID NO: 49090 - DNA, 350 bp, Gossypium hirsutum
  unsure (1)..(350): unsure at all n locations; Clone ID: LIB3196-059-P1-M1-H8
ctttgtttcctaatcactcggcggctgcgcaatcaccgatcaaagctgaagatgggaagccttggaaaagcaatatacaccgtcggattctggattcgggagaccggtcaggctctcgatcgcctaggctgccgcctacaaggcaactattttttccaggagcaactttctaggcatcggactctgatgaacgtatttgaaaatctcctctggtggacaaggatgcatttgtagcccctagcgcatctgtcattggcgatgttcaggtgggaagaggatcatctattttgtatggatgtgttttaaggggngatgtcaacagcattagtgttggatctggaactaatata

SEQ ID NO: 49091 - DNA, 354 bp, Gossypium hirsutum
  Clone ID: LIB3196-059-P1-M1-H9
gcttctcatcacattttattgggcttctctctcagatcttgaaaatgtatacatcaatgaagaagatccacaaagataaggatgttgaaccaacagaatttgaggaatcagttgcccaggcattctttgatttggagaataccaaccaggatctgaaaagtgacctcaaggatctctacattaattcagcagtccaaattgatgtgtctgggagccggaaagctgttgttatccatgtcccctaccgattgaggaaagcttttcgcaaggttcatgttaagcttgtgagggagcttgaaaagaagttcagtggaaaggatgtgattcttattgccacccggaggatattgaggc

SEQ ID NO: 49092 - DNA, 395 bp, Gossypium hirsutum
  Clone ID: LIB3196-064-P1-M1-A1
atccatattctagctccatgtattaataacagtgctttcctgaaccagatgtgtatatttctccttggggcagtaaaatgttgatatgaataccagatacttggtcagagttaagtcaaatactaaatgaataaaagtgaggtctaaagggggaagacagcacttcatctttcagcagattttcttttgccagacaaaaatgtctattcagagactcggccttcctagagccatcctttcatatgaatgccctgtctaaatgcaccagctatatccaggatgtgggttgttttagggcccataaagtgtctgataaacttataatgaaagggttaagtcagttcaagtctgtaaagaatgctttgaaagaatttataagctctaactacttacct

SEQ ID NO: 49093 - DNA, 366 bp, Gossypium hirsutum
  Clone ID: LIB3196-064-P1-M1-A10
cccacgcgtccggcagtaaagctttcagtaagctttctttctggacctggttcacagggtccacagcaacagtcttggattatctccttcctctgggtctggtactggttgcatcattaacattgtgggaaacacagaaggcgtttcagggttctacaagtgactttgatcaaatttaatttctatagttccattccttctgaaagtgatctggctctttgtggattgtattggctgattatgctcatggagcttctcataatttgtaatccatcttttaggcagtaattttatcagttttgcctttgggatttgtcttggaacatgaatacagtggagttggtcctgtgtattgaccgaaataag

SEQ ID NO: 49094 - DNA, 327 bp, Gossypium hirsutum
  Clone ID: LIB3196-064-P1-M1-A11
cttatctttgtgaaaaatataacccagatgagaaatttgaaagtttctctaatacgaacttctagtgtgaaactgtaaagataatataaagatattctgcatcttcctcattttttgtttcaacgtgacacccattttgacatatatctttgaaacttactcgagctcacacctaaactcaagcaaggaatgatacatttacaaatcaatctcttcactttagttctaaattgtacattaaagttctattcatcttttaggtctttaaatggttatttaaggcttatcagaccatttttaagatttctctaaaatttggttgcaatc

SEQ ID NO: 49095 - DNA, 357 bp, Gossypium hirsutum
  Clone ID: LIB3196-064-P1-M1-A12
aaaaaagccacggttactttccatccacagtcgacgggctgactttgcggcggcccatggcgatcgtcgaccggcatcagcggagctccgaaagaaagatgtttagtctttgtcccttttggcagacttcgaccacgatgaacaactcttcctcttcttcttccactaaaaatctcaaccacaatggcagtcgacactcggagacggttgccgccaagcgctctaaatccgtctcatccattgctagatcgcttctccctccacggcgccggctgcgcctcgatccttctaataaactctatttcccttatgagcctggaactcaagcgagaagtgcgatcaggttgaagaacacta

SEQ ID NO: 49096 - DNA, 344 bp, Gossypium hirsutum
  Clone ID: LIB3196-064-P1-M1-A2
gatagctggcacttcgaagcctgataatgggagggggaaaagagggggctgggtgattaaaaactcttacacacctactggataaaacaattttaatgcgcaaaaagcataacgggaagaagaaaagatttttcacgacgaaacacttgcatgctcttcacaaggccttctgtaatcaaccaactaggtccttgtgtccatatgtgcccattgattcaaactcggtgaatatgaaatgtgaacttaaaaccaatggctatcaaataagccgtaggtcatactctccagccattgtaatggaccgttcccatggaagagcctggcaaccactgctgtcaatgatc

SEQ ID NO: 49097 - DNA, 348 bp, Gossypium hirsutum
  Clone ID: LIB3196-064-P1-M1-A3
gcgatatgaatctcatcactgatgatgatttcagagagttggtggataaagtcccaaaaggtagccgcattacaatcgtatcagattcatgccacagtgggggattgattgatgaggccaaagagcaaattggtgatagctctaagccccaaggttcagaaccagaatcagaatcaggttcaagtgggttcaggagcttcttgcaccacactgtactagatgcatttgaatctcgtggaattcatgttccttctagattacgccaccgcgaccaccaccatgataaggaagaggtggatgacaggggagtgattgaagactatgatgacagtggctacgtcaaaagca

SEQ ID NO: 49098 - DNA, 370 bp, Gossypium hirsutum
  Clone ID: LIB3196-064-P1-M1-A5
gtcgagaatgaaaaggatccatctatccgaaacatatatacgattttggtctagggtttatcctatgataaaccataagatatacatatttttaccccatgcttgatatatttatggatgatttctccttggttttattgaattcgatgcttctaatactttaatttcatgttttatactcaggagagcttaggatagcaaaaagagcaagaaacgggccaaaaatggacaaattaggcctaaatcagtgttgcacacggcttaggcacttccacacgggtaatccacacgccattgtgtgacacacgggtagactacacgcctgtgtgtgacacacgagtagactacacccccgtgtgtcatgaccatg

SEQ ID NO: 49099 - DNA, 378 bp, Gossypium hirsutum
  Clone ID: LIB3196-064-P1-M1-A7
tcatctcctccttgcgagagcagctgccgcccaccacggtccagaccattgtcaaacgctgtggcctgcccagcagtggcaagcgcagggcccctcgcagagtttatcagatcccccagcgacggaggctgcagggcaaagacccccgctgggccaccatggctgacctgaagatgcaggccgtgaaggagatctgctacgaggtggccctggctgacttccgccacgggcgggctgagattgaggccctggccgccctcaagatgcgggagctgtgtcgcacctatggcaagccggatggccccggagatgcctggagggccgtggcccgggatgtctgggacactgtgggcgaggaggaatgaggtggagctggca

SEQ ID NO: 49100 - DNA, 386 bp, Gossypium hirsutum
  Clone ID: LIB3196-064-P1-M1-A8
atgcaaattcatgtttgtccatagaagaatgtactcagaactttgtgttgtgaaatgatgagaacagaccacctttaagatacccacctgccacttaaaatgacttagttataattagtagtagtctagacgttgttcttggtgtgtgggggtcaattctaacgtcatgttcttttgaataaatctctcagtcatatttgaaaaaaaatacatgggaataaagaaaaatatcatctttggccaaatccagcaggcatctttttttttttccttgacgtttaactcattatacgtggtaattggatcacaagatctttccgtgtaaaaataacaaaaacatcctttagtttacaaaagagttattctaggcttgaagcctctgaaca

SEQ ID NO: 49101 - DNA, 333 bp, Gossypium hirsutum
  Clone ID: LIB3196-064-P1-M1-A9
gcaactcgtacgctctcatgatctttctccgggaccgtcagccttaccaaacaccttctttacgagaaaatataagctcaagagagaagaccatggccgatcaacttaccgacgatcagatctacgagctcatggaggctttcaacgtgtctgacaaggattgcgacaggtgcattactaccaaggagactaccactgtgatgcggtctcttgttcagaaccctactgaggacgatactcaagatatgatcaatgaaattgatgctgatggaaatggtaccattgattgtaccgaatttcttaacctaatggctaggcaaatggaaggtactg

SEQ ID NO: 49102 - DNA, 378 bp, Gossypium hirsutum
  Clone ID: LIB3196-064-P1-M1-B1
atctgagatcaaccgcatgatccagaggctgagatctgagatcgaccacgtcaagaagcagtgtgccagcctgcaggccgccattgctgatgctgagcagcgtggggaaatggcactcaaggatgccaagaacaagctggaagggctggaggatgccctgcagaaggccaagcaggacctggcccggctgctgaaggagtaccaggagttgatgaacgtgaagctggccctggacgtggagattgccacctaccgcaagctgctggagggcgaggagtgcacgctgaatggcgaaagcgttggacaagtcaacatctctgtggtacaatccaccgtctccagtggctatggcggtgccagtggtgtcggcagtggctt

SEQ ID NO: 49103 - DNA, 384 bp, Gossypium hirsutum
  Clone ID: LIB3196-064-P1-M1-B10
atgccctgccgcaccctggtgcttctgagctgttctgacgggggtctctgtggggaagggtgaggccagggctgtctcaaccccacttcccagccatgttgactttgcctctttcccctcccagcagaaaaatggctacaaacttcctagtacatgagaagatctggtttgacaagttcaaatatgacgatgcacaaaggagattctacgagcagatgaacgggcctgtggccggtgcctcccgccatgagaatggcgccagcgtgatccttcgtgacattgcgagagccagagagaacatccagaaatccctggccggaacctcatgccccggggcctccatcggccccagcggagaccacagagagcttgtcgtccggatcg

SEQ ID NO: 49104 - DNA, 366 bp, Gossypium hirsutum
  Clone ID: LIB3196-064-P1-M1-B11
gatcagacgcccacattcacattcagcggcactcatgggttccaacaccaaactcattctagcgctgctaggcctcctcatcaccaccgctaccgtcgcaaccggttacaccaaccacaccgttggcggtgatgctggctggttctttcattctaaaactaacacatccgccaccaattacacgttctgggctgctaatcagactttcagtctcggcgactatctcatatttaggaccaccacatatcagacggtgatccagacgtacaatgaaacgacttatcgtaattgtactacggacgatgcttcagacaccgataccttccaatacaacggcgggaacacagactttgatcaatccttgac

SEQ ID NO: 49105 - DNA, 363 bp, Gossypium hirsutum
  Clone ID: LIB3196-064-P1-M1-B12
gtgatcacgtgatgaacagttatggatgccggggtggatatcatggcccatttagccacataaatctgttagtctctcaccatgtctatcatctctttctcaccttgagaaaatagctccttttggtttgtagtctgaactaacagaactaggatctttcctataatcatctaaatttgtgctttttcttttctcttcttttctttttttctctcatggattgtcttttgaatttgtatattgatggccctttatgtgttctcacactttccttcagttactttgggtttagatatgtttgatctgttaactgaaacatggagaaattgtttcctattgtttcttgtgatgtaatctgatcta

SEQ ID NO: 49106 - DNA, 262 bp, Gossypium hirsutum
  Clone ID: LIB3196-064-P1-M1-B3
caagctcgcaaaacaatgtgatagcaatgaagttatcaaagctctttgtgatgaagctggtcggactgttgaacccgatggcactacttataggaagggttgcaagccttcggagcgcatggatgtacgtaagtggataacaaaacagagagcctcattttatattaccacccaatgaatgatgtaatctcgcttgatcaaggttaccgtcctcttcggatgtgggacatctcaaacaaaaagggagtattaccatcccata

SEQ ID NO: 49107 - DNA, 392 bp, Gossypium hirsutum
  Clone ID: LIB3196-064-P1-M1-B4
atgctgaacaactcaaccttctctgcacagtgggtgcagcatcctttgaagcatgagttcttaccaggagaagcagacctttaccccaccacctcagcttcaacagcagcaggtgaaacaacccagccagcctccacctcaggaaccatttgttcccataaccaaggagccatgccacccaaaggttccacaacctggaaacacaaagattccagagccagattgcaccaaggtccctaagccaggctacaccaaggaccctgagccaggcagcaccaaggtccctgacaaaggctgcaccaaggtccctgagccaggcagcaccaaggtccctgacaaaggctgcaccaaggtccctgagccaggcagcaccaaggtccctgagccaggca

SEQ ID NO: 49108 - DNA, 374 bp, Gossypium hirsutum
  Clone ID: LIB3196-064-P1-M1-B6
ggcattcttgaaatacgagagttcgtagtacttgtcgagcgagcttgtaaagccgaagagcttagaaaagaaaaacaaaaagttgatgtggaaactggagagtttcgtaaaagatcctcgggaaagtctcttcaacaggcatcgaagaaatttcaagatgatgtgggccggtctagaggcacttcgggcctttttagacgagatcgtgatcgaccccctgtgggtacacgaggcacttcggtcgccagtgttgggaaagaacgtcgagacagaacggagtgtcagcattgtggtaaatggcattcggggagctgtaggttccatgaccgctcctgctataagtgcagatcagttgaccacttcattaaagattg

SEQ ID NO: 49109 - DNA, 369 bp, Gossypium hirsutum
  Clone ID: LIB3196-064-P1-M1-B7
ggatgagcaatatgggcatgaatccaggcatggggatgagcaatatgggcatgaatccaggcatggggatgagtaatatgggcatgaataaaggcatggggatgagtaatatggacatgaataaaggcatggggatgaacatgggcatgaatccaggcatggggatgaacaacatgggcatgaatccaggcatggagatgaacaatatgggcatgagcgcaggcatggggatgaacatgggaatggggcaggcaacccacatgcaatctcaaagtgggatgcctggcggttacaaccctatgatgggttccagtggctactctcaacagcaacatggtggtggtggtggttaccgatgagaaatcattg

SEQ ID NO: 49110 - DNA, 352 bp, Gossypium hirsutum
  Clone ID: LIB3196-064-P1-M1-B8
atcgagaaagtcgagtggccaacgagccggcagagacccaccgagcgtcggcggagggagcagcaccggggcgcacgcggccaccatgacccagacgcccgccttcgacaagcccaaagtggaactgcacgtccacctagacggagccatcaagcctgaaaccatcttatactatggcaggaggagagggatcgccctcccagctaacacagcagaggggctgctgaacgtcattggcatggacaagccgctcaccctgccggaattcctggccaagtttgactactacatgcctgctattgcgggctgccgggaggctatcaaaaggatcgcctacgagtttatagagatg

SEQ ID NO: 49111 - DNA, 384 bp, Gossypium hirsutum
  Clone ID: LIB3196-064-P1-M1-B9
atcttgcatccccttgtgtccatttcatagggtcctatgggtgtggacatcagatgttccaaatgaaatgttccagtttcaaaccctccatcccattctccctataaacattgaaatgtctttaaagtcctaacatatggaggaggagaccacacttttccaacctgcttcttcagacaaaactttgttggtgcaggtggcctgcttttggcttcagaaaacatttgttttcctataggtgatgggcagaattattgggtagggtgggaagacggaaggcagcaattggtggagggagctctataggctgaattgggagtgggggcacacatttttttgagccctggctcatacacatgttgagatggaatagctgccaaagct

SEQ ID NO: 49112 - DNA, 388 bp, Gossypium hirsutum
  Clone ID: LIB3196-064-P1-M1-C1
atggcctctccctgggaaaagctcattccaagagccagaggaaccctcaggcaaggagacggggatgctggcagtgtggagtccagcaggctgtcgtggaagaggggacgcgagcagcacctgcagtgtctactctggggcggaggccacgttagcacagtgagacactggtggacacagtgtgtccgagcagggctggcacatggcactggatggtgctgcttgaaattggcaaattgcctgctaccccaaggcaacttgaaaatcagatgtggctttgccagtaactcctgcaacctgtagttttattcatgacagcagatgctatcaagggcgctgtgccctttgctgatgtagttgaggtaggaagtttgcttgttttggtgat

SEQ ID NO: 49113 - DNA, 376 bp, Gossypium hirsutum
  unsure (1)..(376): unsure at all n locations; Clone ID: LIB3196-064-P1-M1-C11
cgcatatatatactgtctatagccttgnngtttcaaatttttagtttttaccttttatanaatatatatancgtatgtgttttatatcaatttttcaattttctttacaaatatatgtacatgtatatatgtatttgaatatatacgtatgcaaattttcacgatttacctatgtctatatacttacacattttatttttctattttgtaaatatatatacatatgatttaaattaaaataatgatttcatgttatgcattaacatttatcacactttcaaaaacatatattttggttttttcaaaatttttggtttaaaatcatcatattttataaattttcaaaatatttggtactcatgattctcgagaaaga

SEQ ID NO: 49114 - DNA, 369 bp, Gossypium hirsutum
  unsure (1)..(369): unsure at all n locations; Clone ID: LIB3196-064-P1-M1-C12
gaaaatgatttggtgatatgtatagttaaaatganggttaatacaaaagaaagttgtgaaagagtgaatttgcaataatactgttttggacagtagcagtgatgtgattttgtaaaatcacaaaaaatagtataaatttaattagaggctgaatgagatattaaattaaagctcaatgagtgtattttcatataaaagaaacagagcaagcaaaggaactctatatttttagatatttatatttgtgtgtgacttgtttagattgactatgtgatcccctattctgactttgataaatctttaaaaattttaaaaaattaattaagaaatataacttatatgtatagattccttatcgagtctagtttt

SEQ ID NO: 49115 - DNA, 196 bp, Gossypium hirsutum
  Clone ID: LIB3196-064-P1-M1-C3
gccacacgttccatttgatttatgaaagagtcaaacccgtatagggacacattctaagtttctacagcgacatgacttataactatctcctaggatcgtatgaaatgaattagaaggtgagcgttgtttcagactgaaagcttatcgaaactactttcctacacaaataatgtgtgtagaaatgaataggatattt

SEQ ID NO: 49116 - DNA, 369 bp, Gossypium hirsutum
  Clone ID: LIB3196-064-P1-M1-C5
atttaatagattattattaattatatccatatataataaataatttttttcattaaatatgttttatttctagagtttaaaattttcatctttaaaatacatataaatgatgaataaaaaataaataaaaccgatttacctttaaaaaaccaaaagaaaatcacaaattacgaaaaaacttccccattatcttttcgcaatctcgaaaagagacaacctctctccatcttactatgtgtgatgcaactctgtcggtgaccgaccttcccataattcaagttttaaaaattaaaactttatctgcaaaccaaaattttaatccctataaaaagaaaaccttttccaatattttattattttttacaaaat

SEQ ID NO: 49117 - DNA, 387 bp, Gossypium hirsutum
  Clone ID: LIB3196-064-P1-M1-C6
atctcctacctgtcttctgggtgccactcctctggctttgtggggagcgggggctggttctgcgagggctccttcaatggcagcgagaaggagaccatgcagttcctgaatgaccgcctggccaactacctggagaaggtgcgtcagctggagcgggagaacgcggagctggagagccgcatccgggagtggtacgagtctcagatcccatacatctgcccagactaccagtcctacttcaagaccatcgaagatttccagcagaagatcctgctgactaagtctgagaatgccaggctggtcctgcagattgataatgccaagctggccgctgacgacttccggaccaagtacgagacagagctgtccctgcggcagctggtggag

SEQ ID NO: 49118 - DNA, 302 bp, Gossypium hirsutum
  Clone ID: LIB3196-064-P1-M1-C7
attgggccgacccgagagcatgctcttttgggttacacactgtgtgtgaaacaactaattgttggtgttaacaaaatggattccactgagccaccctacagccagaagagatacgaggaaattgttaaggaagtcagcacttacattaagaaaattggctacaacccggacacagtagcatttgtgccaatttctggttggaatggtgacaacatgctggagccaagtgctaacatgccttggttcaagggatggaaagtcacccgtaaggatggcaatgccagtggaaccacgctgcttga

SEQ ID NO: 49119 - DNA, 188 bp, Gossypium hirsutum
  Clone ID: LIB3196-064-P1-M1-C8
gctcttcaaggggttgggaagggtaagtgtcctcttactactaaattttctcttatcctgtattattaccttatttttgtttcttcctatatttctccatgatttgttttatttattttgagtggctaaattttcaaaaaaggaaagaataatgtcggtaagataccctaaccaagaatgaaataatt

SEQ ID NO: 49120 - DNA, 361 bp, Gossypium hirsutum
  Clone ID: LIB3196-064-P1-M1-C9
tgaagcgatagtcatcttcttctaacccaaacgataatttctacttcctaaatccccaattacagttgccttttttccctaattttaccaattatttagttcctttcatccaaaattttgatcctagaagaagtcgaatggcgtcaagaacagttgccaaagatataataactcttcgaggctcagcggcaatcgtcagcgagttttttggatatgcagcgaacaggtaaagatgagcggaagtttatcccctcccctttaattatcctttttatttttatgaaactattatttttagatttagaataaaaagagtggtgattatggttttctatagcattttgtacaatcgaggagttta

SEQ ID NO: 49121 - DNA, 311 bp, Gossypium hirsutum
  Clone ID: LIB3196-064-P1-M1-D1
aatttcgaagcaactgctgaggcaatgaacgaggcaatctcgatggctgatgctgagaagcagttacgacacgagaagcattataggtacattagttcacatgatgtagcgttttggtctcgtagtttctttcaagatatggaaaggacgtgtaaagatcattttagaagacgatgctggggaattggtttgagcttcgggtttagagttgtagcactggaccctaacttcagaaagttgtctatcgatcacatagaatccgtgtatgtaaggtccaaaaatcgggctatattattagactatgatggaac

SEQ ID NO: 49122 - DNA, 374 bp, Gossypium hirsutum
  Clone ID: LIB3196-064-P1-M1-D10
atccgagacgggctgaagctcatgttgctcctggaggtcatatcaggggagcggttacctaagccggagcgggggaaaatgagagtgcacaaaatcaacaacgtgaacaaagcactggactttattgccagcaaaggtgtcaagctggtctccatcggggcagaagagattgtggacggcaacgcaaagatgaccctgggaatgatctggaccatcatccttaggttcgccatccaggacatctccgtggaagagacctcggccaaggaagggcttcttctctggtgccagagaaagacagccccgtataagaacgtcaacgtgcagaacttccacattagctggaaagacggtctttgcctcaatgccctgat

SEQ ID NO: 49123 - DNA, 112 bp, Gossypium hirsutum
  Clone ID: LIB3196-064-P1-M1-D11
cccacgcgtccgccctgatcgcgcttgagcctcaatttgaatttaaatacgaccaaataacgtttcgagtgattcattccataaataactaattagttaaacgatgagattt

SEQ ID NO: 49124 - DNA, 385 bp, Gossypium hirsutum
  Clone ID: LIB3196-064-P1-M1-D12
atgccagggtgagcaggctagaaactcaggacaccaggtagccctgcaggtgctgggtgggcaactcagcccagaggaagagcaggctcgggagctctcacagcccaacagggactggcccccggccctctccaccccactgccctgaagccagatttcctgctcagcatggacaagacagcaagaggctagccctctgcccaggtggaagctgaccccaagccacccttcacctggacaggatgagagtgtcaggtgtgcttcgcctcctggccctcatctttgccataatcacgacatggatctttgttcgaagttacatgagcttcagcatgaaaaccatccgtctgccacgctggctggcaccaccatccaccaaggagat

SEQ ID NO: 49125 - DNA, 374 bp, Gossypium hirsutum
  Clone ID: LIB3196-064-P1-M1-D2
tcgcccacgcgttcgcccacgcgtccgcggacgcgtgggcttgccagaaggattgtggagactgaaatgccaatcatggttcagatacagcaattgatccgaggagcgaaaaatgctgtgtcactcgctcagggagtggtttactggaaaccacccaaacaggcattggataaggttaaagcacttgtagaggagtcttcagttagttgttatggtgctgatgaaggtcttcctgaacttagagaagcattgataagaaagttacgtcaggagaacaatttgcagaggtcttcggtgatggtcactgcaggagcaaatcaggcatttgtgaatcttgttctaacactgtgtgatgcgggggactcggttgtcat

SEQ ID NO: 49126 - DNA, 353 bp, Gossypium hirsutum
  Clone ID: LIB3196-064-P1-M1-D3
agaaaatttacgttgtcactaacggaagaggaacagttacgttcgtgacacatgaaaacaaagagtcatacaatgtagttcctggagttgtagtaagaattccagcaggaagcactgtgtacttggccaaccaagacaacagggaaaagctaaccatagcagtgctccaccgacctgtcaataaccctggacaattccagaaattcttccctgctggacaggaaaatcctcagtcatacttacgaatcttcagccgtgaaattcttgaggctgtcttcaatacacgaagtgagcagctagacgagctgtttggtgggaggcaaagccatcgaaggcagcagggacagggaatg

SEQ ID NO: 49127 - DNA, 371 bp, Gossypium hirsutum
  Clone ID: LIB3196-064-P1-M1-D4
ctcaactgagcattttgatatgtggctcgagagtgtgctccctgattaagtgccctaatgggtaccctgattatgagttgacggtttatagttttgtaaaccttttgtgtactacatgagcatccatcgatatttcaataattcaatggagaacacttctaatatgagaaattataagattaaaagcgttacatctcaaatacttctgaatacctgagagagtgtagcatgatgagctcatccatgtttatttgatgtacatgtgaattatgtggctaactagcttatttaagtatatgtgattaggcaatttgcaaattttttgggaatcatgttattgtatgcttgtttgaatgaaaataattggtaag

SEQ ID NO: 49128 - DNA, 349 bp, Gossypium hirsutum
  Clone ID: LIB3196-064-P1-M1-D5
atggtgcggtggtcggcggggaggcccccgcgctggaaaatgatgcccgtcgcgcccgcgcgaccatgcaatggcgagcgcttgtcctggggctggtgctcctccggcttggcctccatggagtattgtggctcgtcttcgggctggggcccagcatgggcttctaccagcgctttccgctcagcttcggcttccagcgtctgaggagccccgacggccccgcgttgcccgcctcggggcccgtgggccggcctggggggctattcggtccgtagtggctggagacgccggggaccgcggcgtcgcatagcccgcgcatggttccgcggcgtgctgagccgggggtgtg

SEQ ID NO: 49129 - DNA, 368 bp, Gossypium hirsutum
  Clone ID: LIB3196-064-P1-M1-D6
cccacgcgtccggtcaactgtcaaagtttctctctctctctctctctctctattgttgaagttcataagcttttgtatcaatggctgaagtccgtgaccgcaacctgcctcaccaagttcaagttcacccacagtaccgtttcgacaatacaaccggaggcggttacggtgcaaagaactatcacagtggaccatcaacaagccaagttctagccgtccttacacttctccccattggtggtacactgcttgcattagccgggttaacactggccggcaccgtcattgggctgatgctagccacaccgctgttcatcatcttcagcccagttcttgtcccagctgccattgccattgccatggcagtg

SEQ ID NO: 49130 - DNA, 270 bp, Gossypium hirsutum
  Clone ID: LIB3196-064-P1-M1-D7
atattacatccaactggccctcgccctcctccgtgaggatggtggcatggtgttctctctttgagtggttttctgctttgggagaaggaaagtcgacttcacctcagcctcccacttgcatcaggaatgccttgtgccttctctgggacacgtttcaactctttcaacctcagcattgcacccagtgccccagctgaaggaaccataatacacagcgcggagcatccaaatcaagctgctgtaattagctggaaattatgatgtgcttac

SEQ ID NO: 49131 - DNA, 343 bp, Gossypium hirsutum
  Clone ID: LIB3196-064-P1-M1-D8
gagctgtttggtgggaggcaaagccatcttaggcagcagggacagggaatgttccgtaaagccagccaggaacaaataagggcattgagccaagaagctacttcaccaagggagaaaagtggcgagagattcgccttcaacttattgagccaaacccctcgctactacaaccaaaacggccgcttctttgaggcttgcccacgtgaattccggcaactcatggacatcaatgtcaccgttttagccttgcaattaaaccaaggatcaatctttgtgccgcactacaattcaaaggctacattcgtgatccttgtttccgaaggaaatggatacgctgaaatgg

SEQ ID NO: 49132 - DNA, 354 bp, Gossypium hirsutum
  Clone ID: LIB3196-064-P1-M1-D9
atcacatcaacaaaatcatgaggagcatttgtgttgtgcttgttatctctttgcctttccttctcggcattgcccagggtttcgatttccacgacaatgatttagcgtcggaggatagtttgtgggatctatacgagcgctggcggagccaccacacggtttccaggagtctcgacgagaaacatcggaggttcaatgtgttcaagcagaatgttttgcatgttcacaacaccaacaacaaggacaaaccttacaagttgaagatcaacaagtttgctgatatgaccaaccacgaatttaggaatgcttacgctagttccaagattaaacatcataagatgttccaaggacagt

SEQ ID NO: 49133 - DNA, 368 bp, Gossypium hirsutum
  Clone ID: LIB3196-064-P1-M1-E1
atttcttcattttctctcttcacaaacccttcttcaaagccggaatttctaacctaacacttcaatctttccggccaagatcaaagttggcggagaatggtgttccctgaaaactccaattattggtctcacttcgattatgctaccttgatcgacgatatccctgtccctgatgatccttatgccggttttgcttggtctacgcagccaatcgacgccccttctaatgttgtcagtgtggaaattgatggctcatttggagattcagacggtctcaaggaatctggttcaaagaagagggttagatccgaatcatgcaatgcatctagctccaaagcatgtagggagaaattgcgtagagataggct

SEQ ID NO: 49134 - DNA, 381 bp, Gossypium hirsutum
  Clone ID: LIB3196-064-P1-M1-E10
atgccaggggtcctcctacgctgtgctcccggcagcggcgctctgccaggtggggccggagctgcgaggaggggtcggcgcctcgcgggcagctccattcccgcctctgcagtggacttggccgcagaatcggggtcccgggctcctggaacttgttccggccaggccgcggcaaggagatctctctggaccgcattcgtccccttctcgtcctcatggcggacaagaaactggtggtggttttcggaggcacaggtgcccagggtggctccgtggcccgcacgctcctggaagatggaacattcaaggttcgagtggtgacccgaaaccctgggaagaaggcagcaaaggagctgaggctgcaaggtgcagaagtagtga

SEQ ID NO: 49135 - DNA, 358 bp, Gossypium hirsutum
  Clone ID: LIB3196-064-P1-M1-E11
cccacgcgtccgcattgagagaataaattaccgtaaatagtaaaatcatccataaatacctctattcctcgctcgatgtgatcagagaaaatgcttaacatgcatcgttggaatgtgaccggagcgttgcaaagaccgaaaggcattcttctataggcgaaagttccgaaagggcaagtgaatgttgttttttcttggtcttcaggcgccaccggaacctgaaaaaatccaaaaaatccatcaagacaacagtaatgtgtttttccagcaagtctttcgatcatttgatcgataaatggtatagaaaaatggtcctttcgggtttgcgagttgagtttcctataatcgatacacattc

SEQ ID NO: 49136 - DNA, 377 bp, Gossypium hirsutum
  Clone ID: LIB3196-064-P1-M1-E12
atgcggcggctgcgggggaacgggcgcggtgggcggtggcggagcgggccaggcctctgccggggcagcgactggcgctactggggccagcgggggcggtggccccatcaacccgacctcgctggcaccctgcgacccgcagatcatcgctctcatcgtggagcatctcaagagccggcgcctttttgacagcttccgcccatactgcctggccgacgtggtcaccaagccagctcaccaaaacctgatgcagaaagtggataattttgtgtcaacacatctggaccagccggagtggaatcctacaatgaacaaaaaccaattgcgaaatggtctgaggcagagtgtggttcaataagtcacggatgcttgaagct

SEQ ID NO: 49137 - DNA, 367 bp, Gossypium hirsutum
  Clone ID: LIB3196-064-P1-M1-E2
cccacgcgtccggccagtcacagagccataagttccacggtgcatgtttgagtagccacaactgtgcgatggtgtgcaggaacgaaggtttctccggcggcagatgtcgaggattccgtcgccgctgcttctgcactaagctttgctaatgcaagcttgcccttagctcatattttaaggatcatttcatgagtaaaagacctttatgtttttcgtgcatgcatgtcaatgtttcaataaggtatctcctaattacttctgttttgggagatcattttcgtctctttttcatgcctttaagggggttctctttgtgttctttgctgtactcgaactgcatttgcagctactttttcatctatgagct

SEQ ID NO: 49138 - DNA, 371 bp, Gossypium hirsutum
  Clone ID: LIB3196-064-P1-M1-E3
acactgagttttcgtaaactcaccccctcttttaaaattttcaggtaatccttagtaggcgattcggctatgggaggactcgaagatggccacaccatgaacggctttaaattttcgtcttttacattacttaaattactttctcttttggtttttaatgtaataaggcattttctccaattttctaccttttaatttggggggtttttaactattatgatttatttctgttaaaggcagagcgtggttttccaaaatgatatttttgttcaaaacatcatgttttttcaacattgttgaaatgcttccgcaacaaacatttttttaaaagtaaggcttgtttaaaatggttaacaaataattaagttgac

SEQ ID NO: 49139 - DNA, 262 bp, Gossypium hirsutum
  Clone ID: LIB3196-064-P1-M1-E4
atgccaggggtcctcctacgctgtgctcccggaaggggcgctctgccaagtggggccggagcttcaaagaggggtcggagccctgcgggcagctccattccaccctctccagaggacttggccggagaatccgagtccctggctcctggaacttgttccggccaggccgcggcaaggaaaactttttggacccgattcctcccctttttgttctcatggcggaaaaaaaaactgttgtgggttttggaggcaccaggggcca

SEQ ID NO: 49140 - DNA, 236 bp, Gossypium hirsutum
  Clone ID: LIB3196-064-P1-M1-E5
aaaaaaaaaaaaaaaaaagaaatgaaaaaataaaaaaaaaaaaaatgggcgtcccatatataaggtaccaagcttacttactcgatcatgcgcacacaaaatcttttatatagcagtacctaaatttaatcctctcgccttggggtccccacggcattgattctatataaccatgccgtctaccgaacaaaataatgttccttttatattcccctttagtcaactaacgtgcccgc

SEQ ID NO: 49141 - DNA, 386 bp, Gossypium hirsutum
  Clone ID: LIB3196-064-P1-M1-E6
atgcgagctgactggttgtgtggtcgcgtctcggaaaccggtagcgcttgcagcatggctgaccaactgaccgaagagcagattgcagaattcaaagaagctttttcactatttgacaaagatggtgatggaactataacaacaaaggaattgggaactgtaatgaggtctcttgggcagaatcccacagaagcagagttacaggacatgattaatgaagtagatgctgatggtaatggcacaattgacttccctgaatttctgacaatgatggcaagaaaaatgaaagacacagacagtgaagaagaaattagagaagcattccgtgtgtttgataaggatggcaatggctatattagtgctgcagaacttcgccatgtgatgac

SEQ ID NO: 49142 - DNA, 342 bp, Gossypium hirsutum
  Clone ID: LIB3196-064-P1-M1-E7
atggtgactggaaagtggctacaatccaaaattttaaatttaagtctgcctccgccattcaaaagtctaataacaaaaaatggtaacctaatttggccggttggtacgtttgacaactgtcaacatttcattcctaccaggtggttttcaatgatctctttcattcccccaataagggtggaagaagttcctggatgcctggaagaagctcttaacaaacttcttaatgcaagcaatgggtagattaatttgtggggcagctctttaagacattcagaggtgggaaatactggatttattaaggaaatggctggttgggggattccaaggacttaccctaat

SEQ ID NO: 49143 - DNA, 357 bp, Gossypium hirsutum
  Clone ID: LIB3196-064-P1-M1-E8
aacaaacagaagcccatctggatgaggaagcctgaggagattaccaaggaagaatatgctgctttctacaagagccttacaaatgactgggaagagcatttggccgtcaagcacttctcagttgaggggcaacttgagttcaaggctgtcctctttgtccccaagagggctccttttgatctctttgatacaaggaagaagcccaacaacattaagctctatgtgagacgtgtctttatcatggacaactgcgaggagttgattcctgaattcctcagctttgttaagggtattgtcgactcagaggaccttcctttgaacatctcaagagaaatgttgcagcaaaacaagatcttg

SEQ ID NO: 49144 - DNA, 332 bp, Gossypium hirsutum
  Clone ID: LIB3196-064-P1-M1-E9
gcaactgctggggcatctagctgcacctcatcagatacacgaagacgaaggtttgacccctcatcattccagcagcgtgctgaggcattggaaggattgctcgaatttagtgcaagattgctgcagcaagagaggtatgatgagcttggtgtgctactcaagccatttggacccggaaaggtctcccctagggaaactgcaatctggctgactaagagttttaaggagaacactgtgaagccagaggattaacaccgatgaacctccaccgtttgtatcatatccatagctgtaatctgtaccaattttttagagttcagcctatccgatct

SEQ ID NO: 49145 - DNA, 218 bp, Gossypium hirsutum
  Clone ID: LIB3196-064-P1-M1-F1
tcgcggacgcgtgggtccgagccttctttgacaagaggatctcccaagaagtcagtggtgatgcccttggcgaggagtttaagggctatgtgttcaagataatgggaggctgtgacaagcaaggttttccaatgaagcaaggagttctgactccaagccgtgttcgtcttttgcttcacagaagtactccctgcttccgtgggtatggtaggagaaat

SEQ ID NO: 49146 - DNA, 352 bp, Gossypium hirsutum
  Clone ID: LIB3196-064-P1-M1-F10
cacacccgaaagcgcaaaaaaaaaaaaaaaaaagaaaagaggaaaaacgttctctcccacgaaacccaccattactgcaaatggcgacgacggcccccgacaacctgagccgcgatcagtacgtttacttagcgaagctatccgagcaagctgagcgctatgaggagatggttcagttcatgcaaaaactggtcctcggctcaaccccagccgctgaattaactgtcgaggaaaggaaccttctctccgtcgcctacaaaaacgtcatcggatctctacgtgccgcgtggagaatcgtttcttccatcgagcagaaagaagaaggtcgaaagaacgaggaacatgttgtgct

SEQ ID NO: 49147 - DNA, 385 bp, Gossypium hirsutum
  Clone ID: LIB3196-064-P1-M1-F11
atccgggagtgggatcgcagttcttgtttgtgtgtcggtgtcatcgccacttgacaatgcagatcttcgtgaagaccctgactggcaagaccatcacccttgaggttgagcccagtgacaccattgagaatgtcaaggcaaagatccaagataaggaaggcattcctcccgaccagcagaggctgatctttgccggaaagcagctggaagatgggcgcaccctgtctgactacaacatccagaaagagtccaccctgcacctggtgctccgcctcaaaggtgggatgcagatcttcgtgaagaccctgactggcaagaccatcaccctcgaggtggagcccagtgacaccatcgagaacgtcaaagcgaagatccaagacaagga

SEQ ID NO: 49148 - DNA, 387 bp, Gossypium hirsutum
  Clone ID: LIB3196-064-P1-M1-F2
atcaaggtcaatacataagccagagtgaatgattctacaagttgagcatctctaattcaaaaatctgaaatccagaagcttcaaaatctgaatctttctgagcactgacttgaccccacaagtggaaaattccccacctgacacctttgctttctgatggttcagtttaaacggattttgtttcttgcacaaaattattaaaaatgttatataaattactttcaggctatatgtataaggtggatgtgaaacctgaattatgtaattagtcaggtcccattgtatatatgcagatattccagaatctgaaatccaaaacacttctggtccctagcattttggataagggatactcagcttgtacctacatattcatatatattcact

SEQ ID NO: 49149 - DNA, 338 bp, Gossypium hirsutum
  Clone ID: LIB3196-064-P1-M1-F3
gtttgccgccatgggtattgacacccctggagtcgttgccctcctaggagctcacagtgtcggcagaactcactgtgtgaagctggtgcatcgtttgtacccagaggttgaccctgccctcaaccccgaccatgttccacacatactccataaatgccctgatcagatcccagaccccaaggccgtccagtatgtgagaaacgaccgtgggacacccatggttttggataacaactactacaggaacatactggacaacaagggtttgttgattgtggatcaccaactggcgtacgacaaaaggaccagaccttatgtgaagaaaatggccaagagcc

SEQ ID NO: 49150 - DNA, 392 bp, Gossypium hirsutum
  Clone ID: LIB3196-064-P1-M1-F4
atgtcgacacatcctgttgcagtatctcattttattccaatatctcaaggggcaggtcaaattcaaaagttcaaactatgttttaactgatgaacaatcactttggattgaagatactacaaaatcagtttatcaactactatctgaaaacccccccgatggagaaagattttcaaagatggtagagcatatattaaacactgaagaaaactggaactcatggaaaaatgaaggttgcccaagttttgtgaaagaaagaacatcagataccaaacctacgagaataattcggaagagaacagcacccgaggacttcctagggaaaggacccagcaaaaaaattctgatgggaaatgaggagttaacaaggctttggaatctttgtcctgata

SEQ ID NO: 49151 - DNA, 384 bp, Gossypium hirsutum
  Clone ID: LIB3196-064-P1-M1-F5
attcttcatcaactaatagagcacctaccacagtgtcttacctggtagaggtaagcaattcatattcaaaggttgcaaagtgtttgtaatatattcacaaggctagaagtaggaagagtcaaaaatttgtcctaattataatgagaaccattctaggtcatgatcttggaggacccatgaataagtttccaaaggtgcaaccaaatccatttttatttctgcctgacttagtcacctttgtaaaggtttaacttggtgttgtcaagtaacagttactgaaagagctgagaaaaggaacaatgaacagcaaagatcttgactgtgcaactcagacattcctgcagaaaagacatatgttgctttacaagcaaggccaaagaacta

SEQ ID NO: 49152 - DNA, 298 bp, Gossypium hirsutum
  Clone ID: LIB3196-064-P1-M1-F6
gcggatgaatgaacaaagaggaaatgctggtgcatgtacgggtagattcaataatggtacaaatacatgcatgggataaatgcatggatggacattaaaggctaggccatgaatggattaaatgcatgggatgattgaatgcatataatggcttaaggacacatatggtagctgtcaatgaactatccaaggcacttatttatgcaagaagtagatggtaactaattatatggtgaccatggagcttctagaacatggttcacactttgaattgacctatgagctacgacacatgcat

SEQ ID NO: 49153 - DNA, 279 bp, Gossypium hirsutum
  Clone ID: LIB3196-064-P1-M1-F7
ttttcgttcatttttcgcttattaaaaataatcaaccaaaaacacattaagaatgatgttaaaacataccaattttagcagttatcaaatatccccacagttaagcatttgtttgtccttaagcaaaactctcaacccttattcaagttaatctccctcaatttattgttttcactaacaaagccttatgaataatctacagataatcatgcattggaaattgaaactatcatgacactaaagaataaaagcaatctaagcagaaatttgtaaagcaca

SEQ ID NO: 49154 - DNA, 317 bp, Gossypium hirsutum
  Clone ID: LIB3196-064-P1-M1-F8
cccccccccctttattttttttttttttttttttaaaattttttttttattatttttttaatttattttttttttttttttttttttttttttttatttttattttttttcttttttttttttcaaaaaaaacccaaatttaaaaaattttttttaaaaaaaaaattaaagaaggtgcaccctaataaaaatttttttttttttttcacgaaaatataaaaaactaattttttttatttattaaaaacattgtttttgttcctcacattgggggaaattgaaaaccaaagacatctttttcctaaaaatttttattt

SEQ ID NO: 49155 - DNA, 382 bp, Gossypium hirsutum
  Clone ID: LIB3196-064-P1-M1-F9
attatcaagtgaattaatcactagaaagatgggtgtcagacttgtagacacagcagatcggcatccttcgctgccccttagcaacttaggtggtcaatctgaagctgtgaaggtgtgatttttcaggagctggaagtcttagaaaaaccttgtaaatgcctacattgtgggcttttgacatatttaagggaccgcttaagacgagattagatgggctcctctggatttgtaactcatttgtcacagataccttgtgattgaaaatcgtgagtgaagtgaaattgcagtgcatttcaagggaattttgtatgtaaatcgtgccttagaaacacttctgttgtcttttctgtgtttggtcgatattaataatggcaaaattttt

SEQ ID NO: 49156 - DNA, 368 bp, Gossypium hirsutum
  Clone ID: LIB3196-064-P1-M1-G1
gtgtttttgcggcaagcattggccttgggaatcttgggtttttctgcaaaaatgttggcggtttttgagaaagcaacaggaaatccaccggaggagctcaggcttccttcagttggattggattctgacggtaagggaactcgagaagaaatcttgcagactttcaggttgctgtggccagagtcgaccttttaccacctttcaaatggaaatttcatgacactgtcacatggagctcagagtcctttgcatccaaggtccatggttgtcatggatgacatcttctgcatctttattgggactcttgtgaacatttgcgaactcaggcgacattacggcttgtccagacaagcaacagaagccatgct

SEQ ID NO: 49157 - DNA, 353 bp, Gossypium hirsutum
  unsure (1)..(353): unsure at all n locations; Clone ID: LIB3196-064-P1-M1-G10
agaagcctcaccgtttcaggccaggaactgttgctttgagagagatccgtaagtatcagaagagcactgaactgttgatcaggaagcttcctttccagaggttggtgagggaaatcgcgcaagatttcaagaccgatctgaggttccaaagcagcgccgtcgctgctcttcaagaagcggcggaggcttatcttgtcggactgtttgaagacactaatttgtgtgcaattcatgctaagagagttacaatcatgcctaaggatatccagcttgctaggaggattagaggtgagagagcttangttgcctgtatttacttgattgattataaaatttagaaagatctaaatctt

SEQ ID NO: 49158 - DNA, 362 bp, Gossypium hirsutum
  Clone ID: LIB3196-064-P1-M1-G11
cggacgcgtgggttttttcttcttgcccttttttctatttctttcttcagacgatcttcaatctcttcgaacattttaggcaatgaagcccggagtttcttcattgaacccatatgcagcatcatacatacctcttgccaaaagggaggccagtgataatgtgacagccaaagatattaaacacagcaatgagaatgcttggttcaaaccttcctcacactttgcatataacccacacagtagcaatgcttctcttggctcttcagcctatggtactgaaaagcaccaggttgcagaaggttctgcagtgaaaagccatcctgctcatggttctttgatgcacaatcctggtgaaatgactg

SEQ ID NO: 49159 - DNA, 68 bp, Gossypium hirsutum
  Clone ID: LIB3196-064-P1-M1-G12
cttgattacgggtgcagtggcattatcattgttggaattctttgattgagacgatctgctatcttttt

SEQ ID NO: 49160 - DNA, 364 bp, Gossypium hirsutum
  Clone ID: LIB3196-064-P1-M1-G2
cggacgcgtgggctggaattacaaggtttattatgtatatggctttatgctgctggtcttcctgattctcatcattgtaactgtttgtgtgacaattgtggggacatatttcttgctaaatgctgagaattatcactggcagtggacatcgttcttctctgctgcctccacagctgtctatgtgtatttgtactccgtatactattaccacgttaaaaccaagatgtcaggcttctttcaaaccagcttctacttcggatacactttgatgttttgtcttggcttgggaattctctgcggagctgtaagttatcttggttccaatttattcgtacggaggatctatagaaacattaagtgtgac

SEQ ID NO: 49161 - DNA, 391 bp, Gossypium hirsutum
  Clone ID: LIB3196-064-P1-M1-G3
attgctttgtggggttgtgatgagacccacacaggagtggggaagctgagcatggtccacatgggttcaggggaagggggaatggtcccagccagtggagtgaggagtctggcacagtctctgagagccgtctccactccttctgtctccagacatcaacttcaacgtgtcaggcctcttctcagctgttaccctccaggacacggtcagtgacaggctggcctctgaggaactttcacccactgctgtgcccaccccaaccaccaccccggcttcggctccagctccagttccagccccagccttggcctcagcagctaccaaggaaaggacagagtctgaggtaccccccagaccagccttccccaaggtcaccaggagccccccggag

SEQ ID NO: 49162 - DNA, 368 bp, Gossypium hirsutum
  Clone ID: LIB3196-064-P1-M1-G4
ctccatttgatctcgctaattatgatacaattcaaacaccgtcttcccatcctcttctcttctctgtcaccgcttctctcacggcgccgcgcacgttaggcaatggacctaatgcatcattcttctacttttctgctccctacgattcccctacaccaccgcccttctctaacgtacgcccttgttgttcttaaccaaaccctccccagattcgcccctttgctttggaaacacgctcagcttcgtctctgtgctgatggtggcgccaaccgtgtgttcgatgaaatgcctctgttgttccctgaggaagatgcttccgatgttcgacgcagatacaaaccggatgtaattaacggtgatatggattc

SEQ ID NO: 49163 - DNA, 375 bp, Gossypium hirsutum
  Clone ID: LIB3196-064-P1-M1-G5
atagaaagtcgagtggccaacgagccggcagagacccaccgagcgtcggcggagggagcagcgccggggcgcacgcggccaccatgacccagacgcccgccttcgacaagcccaaagtagaactgcacgtccacctagacggagccatcaagcctgaaaccatcttatactatggcaggaggagagggatcgccctcccagctaacacagcagaggggctgctgaacgtcattggcatggacaagccgctcaccctgccggaattcctggccaagtttgactactacatgcctgctattgcgggctgccgggaggctatcaaaaggatcgcctacgagtttatagagatgaaggccaaagagggcgtggtgtatg

SEQ ID NO: 49164 - DNA, 388 bp, Gossypium hirsutum
  Clone ID: LIB3196-064-P1-M1-G6
atggaatcctggccctatcccacaccatcagccccttcatgaataagttttttccggccacctttccaaatcgacagtaccagctgctcttcacacagggttctggggaaaacaaggaagagatcatcaattatgaatttgacaccaaggacctggtatgcctaggcctgagcagcatcgttggcgtctggtacctgctgaggaagcactggattgccaacaacctttttggcctggccttctcccttaatggagtagagctcctgcacctcaacaatgtcagcactggctgcatcctgctgggcggactcttcatctacgatgtcttctgggtatttggcaccaatgtgatggtgacagtggccaagtcctttgaggcaccaataaa

SEQ ID NO: 49165 - DNA, 289 bp, Gossypium hirsutum
  Clone ID: LIB3196-064-P1-M1-G7
cggacgcgtgggaaaaaatcaaattccaaatttttatttcatttgctcactaaaccgaatacacttaccatgttcacaaacactcttcaacgatttcttttctttagtcaaacacataattttccatctcaaaatttattttcctactaatttaacttactccgaggttgaatgttactttagcattaagcttatattctcttcgttattaagtaattgttcatagctcaactagcatccattttcgatttaacacaaaaattcataaccaaatgttatttatcttaag

SEQ ID NO: 49166 - DNA, 382 bp, Gossypium hirsutum
  Clone ID: LIB3196-064-P1-M1-G8
atgtctttggcaagatatggcaaaagcccatacctttatccactctatggccttggagaactgccccaaggatttgcaaggctaagtgctatttatggaggtacctatatgctgaataaacccattgaagaaatcattgtgcagaatggaaaagtaattggtgtaaaatctgaaggagaaattgctcgttgtaagcagctcatctgtgaccccagctatgtaaaagatcgggtagaaaaagtgggccaggtgatcagagttatttgcatcctcagccaccccatcaagaacaccaatgatgccaactcctgccagatcattattccacagaaccaagtcaatcgaaagtcagatatctatgtctgcatgatctcctttgcgc

SEQ ID NO: 49167 - DNA, 138 bp, Gossypium hirsutum
  Clone ID: LIB3196-064-P1-M1-H1
atcaaactttctgagcacctttctttttttcaggcgactgctcgctcgctcacctccctccttgggaccatgaccacctgcagtcggcagttcaccttctccagcttcatgaagggcttctgcggcatcgggggcggt

SEQ ID NO: 49168 - DNA, 348 bp, Gossypium hirsutum
  Clone ID: LIB3196-064-P1-M1-H10
cccacgcgtgcgcccacgcgtccgctcgaaactccgatttcaggcacagggcattttccttcttgtttgcagaaggtgaaaatgaggaaataaatgcttctcaaacagtggattcacattctttcccacagcattttatcaagtcaaaagatgaattcgggcttgccccagctgctgttgttgtaactcggaaggaactatatgattcttcatcagctttaaaatcactggattacaacaggcagataaggccagagtctcctattatagctgctaggaaaatgaaaggtagcattttgaaggaaaatgaaaacccagattttgttacaaacccataccaggccattg

SEQ ID NO: 49169 - DNA, 378 bp, Gossypium hirsutum
  Clone ID: LIB3196-064-P1-M1-H11
atctgtgtgcccccctggaggcatccaagaggtcaccgtcaaccagagtctcctgactcccctcaacctgcaaatcgaccccgccatccagcgggtgcgggccgaggagcgcgagcagatcaagaccctcaacaacaagttcgcctccttcatcgacaaggtgcggttcctggagcagcagaacaaggttctggacaccaagtggaccctgctgcaggagcagggcaccaagaccgtgaggcagaacctggagccgttgttcgagcagtacatcaacaacctcatgaggcagctggacagtatcgtcggggaacggggccgcctggactcagagcttgaaaacatgcaggacctagtggaggacctcaagaacaaata

SEQ ID NO: 49170 - DNA, 366 bp, Gossypium hirsutum
  Clone ID: LIB3196-064-P1-M1-H12
cggacgcgtgggaaccaacaaaaagcattagaaagaaaactgcctttaaaaattaaaattctattcaacttctttgtttatctctctctggtatatttttcctctctattgtctctctttagaacaatcctttcatccaaaaacccaatacaactgtttacaaaccctagaaagaggaattgaaagagaaaacggacaattttggatcaaaggctttgatcggtgagggttcttacggaagagtttattatgctagcttgaacaatggaaaagctgtggctgtgaaaaagcttgatgtttccactgagtccgagtcgaatgtggagtttttgacccaggtttccatggtttcaagactgaagcatg

SEQ ID NO: 49171 - DNA, 374 bp, Gossypium hirsutum
  Clone ID: LIB3196-064-P1-M1-H2
gcgacttctcgaatcttccgcagatccattggctctcaagcaactctccttctttttaagtctacgccttcgttcttcctcacattaagatttcaaatcccccttttttgcggcggttaacgtttgctgatcgttgctcggtttccgaggatcaatcatgactcgcggtaaccagagagagcgagatcgagaaagggctcaagcccgagcgggcaaaggcagcatgaacaaggacgatggcttaaccccagaacaacgccgtgaaagagatgcaaaggccttgcaagaaaaggcggcaaagaaggctgcgcaggcggcagctggagggaacaatgctggaggcggaagtaaaaccaagaaataattatccgatg

SEQ ID NO: 49172 - DNA, 390 bp, Gossypium hirsutum
  Clone ID: LIB3196-064-P1-M1-H3
atatgagttcccgcctgatctacacactccgctgcggggtctttgccaccttccccattgtgctggggatcctggtgtacgggctgagcctgttatgcttttctgcccttcggccctttggggagccacggcgggaagtggagatccaccggcgatatgtggcccagtcgatccagctctttatcctctacttcttcaacctggccgtgctttccacttacctgccccaggacaccctcaaactgctccctctgctcactggtctctttgccatctcccgtctgatctactggctgaccttcgccgtgggccgctccttccgcggcttcggctatggcctgacgtttctgccgctgctgtcaatgctgatgtggaacctctactacatgt

SEQ ID NO: 49173 - DNA, 356 bp, Gossypium hirsutum
  Clone ID: LIB3196-064-P1-M1-H5
cgggctttctgttcaggcgtggatttgacggctgcacaagatgttttcaagggtgacgttaaggacccggagacggatccggttgttcagatggagcaatgccccaaaccaatcatcggagctatcaacggccttgctattactgccggcttcgagatcgccctcgcttgtgatatgctggtcgctgctaagggagccgctttcgttgatactcacgccagatttggtatatttccttcatggggtttatcccagaagcttgcacgctttataggaccaaacaaggctcgcgaagtgtcgttggcagccatgcctttgtcagcagaggaagctgagaaattggggtttgtcaatta

SEQ ID NO: 49174 - DNA, 69 bp, Gossypium hirsutum
  Clone ID: LIB3196-064-P1-M1-H6
tcggtcctcttcaacagagctggtttgattccacaatggaacgtcaacgctcacaaaatactctacatg

SEQ ID NO: 49175 - DNA, 382 bp, Gossypium hirsutum
  Clone ID: LIB3196-064-P1-M1-H7
atcagccttcctgagcaccttcctttctttcagccaactgctcgctcgctcacctccctcctcggcaccatgaccacctgcagtcgccagttcacctcctccagctccatgaagggctcctgcggcatcgggggcggcatcgggggcggctccagccgcatctcctccgtcctggccggagggtcctgccgcgcccccagcacctacggcgggggcctgtctgtctcctcctcccgcttctcctctgggggagcctgcgggctggggggcggctatggcggtggcttcagcagcagcagcagctttggtagtggcttcgggggaggatatggtgctggcttcggtgctggcttgggtggtggcttgggtggtggctttggtg

SEQ ID NO: 49176 - DNA, 75 bp, Gossypium hirsutum
  Clone ID: LIB3196-064-P1-M1-H8
aaaaaaaaaaaaaaaaaaaaaaaaaaaaaaaaaaaaaaaaaaaaaaaaaaaaaaaaaaaaaaaaaaaaaaaaaaa

SEQ ID NO: 49177 - DNA, 368 bp, Gossypium hirsutum
  Clone ID: LIB3196-064-P1-M1-H9
atctcctgcactacttgcaaagtaacgagctgaagccgtgctacaataacactagtgttttcaacaataaattaatcatagctgcagcttgtttcttttaaactctaaatataaaggaggccaaacatgccgcctcgtagataccaatttgggagggctgatgaggccactcatcccgactccatgagagccaccttggctgaattcctctccactatcattttcgtctttgccggcgaaggctcaattcttgctcttgacaagatgtacaaggatacgagtgcgacgcctgcaagactggtgatgatagcacttgcgcatgggttgtctctgtttgcagctgtggcatctagtgtaaacgtatctgg

SEQ ID NO: 49178 - DNA, 187 bp, Gossypium hirsutum
  Clone ID: LIB3196-065-P1-M1-A1
atcctgtgcatggcatcctgttggattcacgaaaccaccttgggctgtattctgaattgtgaccatcacatccacaaagacctgtacgccaacacagtgctgtctggtggcaccaccatgtaccctggcattgcttacaggatgcagaatgagattcatgtccttgctcccagcacgaagaatatta

SEQ ID NO: 49179 - DNA, 389 bp, Gossypium hirsutum
  Clone ID: LIB3196-065-P1-M1-A11
atccgctgcggggagatgctccacatccgccaccggctgctccgccaggcgctggccgaatgcctggggaccctcatcctcgtgatgtttggctgtggctccgtggcccaggttgtgctcagccggggcacccatggtggtttcctcaccatcaacctggcctttggctttgctgtcactctgggcatcctcattgctggccaggtctctggggcccacctgaaccctgccgtgacctttgccatgtgcttcctggctcgtgagccctggatcaagctgcccgtctataccctggcacagacgctgggagccttcttgggtgctggaatcgtttttgggttgtattatgatgcaatctggggctttgccgacaaccagctttttgtttc

SEQ ID NO: 49180 - DNA, 400 bp, Gossypium hirsutum
  Clone ID: LIB3196-065-P1-M1-A2
atcgcgcagttcgcagcagcagccgtgagcttaaccgccggggaggtagccatgaagcactaccaggtggagattctggatgcaaagacaagggagaagctgtgtttcctggacaaggtggagccccacgccaccattgcggagatcaagaacctcttaccaagacccatccgcaatggtaccccgtccgccagtccctccgtctggaccccaagggcaagttccttaaggatgaggatattctacagaagctgcccgagggcaccacggccacgctctactttcgggacctgggggcccagatcaactgggtgactgtcttcctaacagagtacgcagggccccttttcatctaccttcttttctacttccgagtgcccttcatctatggccacaaatt

SEQ ID NO: 49181 - DNA, 318 bp, Gossypium hirsutum
  Clone ID: LIB3196-065-P1-M1-A3
atcgaggggaagaaagccggaggcggccgattgggggccggggtaggggacccatacctagcccccgctctacttgatcctatctttcttactctttcatcctacttcttaactatcctatcagttctccttacatcctattactcacatttgtactacaacccctggactattaataccctgttgaaccccacttacaagtgccatgctacatccctctttccttccgttcacttataaatacagtacccgcatttattgatgcctctaatcattattgtcctaacatgacatataatggcctggaatatttattaa

SEQ ID NO: 49182 - DNA, 121 bp, Gossypium hirsutum
  Clone ID: LIB3196-065-P1-M1-A4
atgcacgctgctggagaccctcctgtgtcacagtctgtacacagcgcttgatatggtcattgctggggaatcataatacaggcgctccaagcagctgggtatcattctattcattgtggcg

SEQ ID NO: 49183 - DNA, 403 bp, Gossypium hirsutum
  Clone ID: LIB3196-065-P1-M1-A5
atcatttacatgcatgcaatcagacaggccactaaggtaaaagagtctgctctatcatagtgttgagagcgtgtgtagtgctgcatcttatgacaaggggacagacaagctgggacgtcagggaaatgaacaaaagggacgcagattatttggggtgagtgggtggtgggagcccagaacaaggtggagggtgcagaggggctggggtaggtcatgtaggagggaggtgggtgggtcaggtgagcggaaggggtgttgtatattgtgttgatgacgtacgttatttccatggaagatagccactgtggcagctgtcacatccccacagcccccagggtctgccgagaaggcaggcaatctttgggttctgttctttgtcacgtcccctacgagtaaattttgt

SEQ ID NO: 49184 - DNA, 384 bp, Gossypium hirsutum
  Clone ID: LIB3196-065-P1-M1-A7
atgccggccttgctggtggctttgggggccctggcttccctgtgtgcccccctggaggcatccaagaggtcaccgtcaaccagagtctcctgactcccctcaacctgcaaatcgaccccaccatccagcgagtgcgggccgaggaacgtgaacagatcaagaccctcaacaacaagttcgcctccttcatcgacaaggtgcggttcctggagcagcagaacaaggttctggaaaccaagtggaccctgctgcaggagcagggcaccaagaccgtgaggcagaacctggagccattgttcgagcagtacatcaacaacctcaggaggcagctggacagcatcgttggggaacggggccgcctggactcggagctcagaggcatgc

SEQ ID NO: 49185 - DNA, 347 bp, Gossypium hirsutum
  Clone ID: LIB3196-065-P1-M1-A9
atgactgatgcaaatttgcactctgctccccctctgtaaggatactgatagcacaacctcttcttccccccaccggcccgccttctggtccttcaacccagtccctttctgtccctcttcctgtagcccagtctcaggctttcctcctcctgaagccctacagaggtagggaatggagcccaggcaccaggggtctgaagtgtgagccacccagaagagagacgccaactgcacccttgccacttccaaagcaatagaggcagaggggtcccctctgccacctagcccagctttgaccctggcattaactagccgtcttaaaaaaaacaaggtcctggtaggggggg

SEQ ID NO: 49186 - DNA, 382 bp, Gossypium hirsutum
  Clone ID: LIB3196-065-P1-M1-B10
gcgcccacgcgtccgaccacgcgtccggaaacacaggacccctgcttcctatgctgatgttttcaacccacgaggtggtgcgcatcaccacagctcacagcttcaatctttctattcttcaataccttcaacttagcgcctggaggggagatctttacaataatgctctgtacgctcatcactggaacatgaatgcccacagcattgtttacatcacatggggagatggatggattcaaattgagtctgaacacggagaggcgctattctatgagcaggtagagaggggtccgggcatatccgtactctagaatgatgcagtgctgaaaaaagcatgaaggcgagggtttgaatggatagcattcaagacatatgccaatgc

SEQ ID NO: 49187 - DNA, 380 bp, Gossypium hirsutum
  Clone ID: LIB3196-065-P1-M1-B11
ttcttctagaagagttttaacaatctttttagattgtggagattatcttcaaattttttcttgccaatgtttctatcttggaggggaaattagagccgtttgaagagggttgtagattcttcatgtttccaaggcttcttaggacttccacacgccatgttctatctttccatttatcttctttattcgcttccttaatttttgatttattattttattttagttatttattttaattgttttatctgacttagattcaatttcgtttcaggttgtgtcaaaatctaagtttctttccgaacgattagagccctaagtcaaattcgcgactttgacaaactttacgatccgcttttgcgttcatccttctcatcctttat

SEQ ID NO: 49188 - DNA, 378 bp, Gossypium hirsutum
  Clone ID: LIB3196-065-P1-M1-B12
gttgaaattgtctacacaaagagggtgatttagaaatggatgctgatccatggactctttgtctttcttcaactgctaggagatatcaatcagctcttcagtcacgatctgatatgtttatggggtttgaagaaatggatggagaagacgatgtaagagaggagtttccatgccctttttgttcagagtatttcgatatcgtgggcttgtgctgtcacattgatgatgaacatcctgtggaggctaacaatggggtatgtcctgtctgtgcaatgagggtgggagtagatatggttgcgcatataacgcaacaacatggacatatattcaagcgtaagcggagatcacgtagaagtggatctcattcaacgctctctc

SEQ ID NO: 49189 - DNA, 378 bp, Gossypium hirsutum
  Clone ID: LIB3196-065-P1-M1-B3
tcgttcatactcatttatcccctgtgggggcattgaaatcactccagttttctttatcactgaaaaatgtcttgctgtggtggaaactgtggctgcggttctggctgcaagagtggcagtggctgtggaggatgcaagatgtacccagacctgaacgttgcctagatgaccacaactgagactctggttcttggtgtagcaccccagaaagcacactttgagggagctgatatggaattcggggcttagaacggctgcaagtgtggagacaactgcacctgcaacccttgcaattgtaaatgatttgagaccaaagcctaagctccctggaagcagagacgccttttgcatttaagaaataatatattttgctgttta

SEQ ID NO: 49190 - DNA, 357 bp, Gossypium hirsutum
  Clone ID: LIB3196-065-P1-M1-B4
ggcctgcaatcttgcaaccaaaggagtggtaaattaaggacaagcaagcctgtcttctatgatttcctgaccaaagacagggctgacttaaacctagccccttctttctcgtcatccgtctccagtgggatcacccaagtttcaaataatgacacggatgaccactaggaaagcagttgttgcaatagttttccttatttcagaagaaaaccctaaaaagtcacaggtcacaccctttttttttctctctcttttcctgcctgtaccagtagctcggattctgattagccaatcagtgtaacatcttcaaagaaaagaaaaagataagaaaaactagtctagtggttggtaaattat

SEQ ID NO: 49191 - DNA, 386 bp, Gossypium hirsutum
  Clone ID: LIB3196-065-P1-M1-B5
cttgggttgagtgtagagatgaggaaaatcatgggtgccaaagttctcttcttctttgctttgctttccttttcagctgtgtcggcatttgcacaggatgaggaagaccaaggtcttgttatgaacttctacaaggattcttgtcctcaggctgaagacattatcaaggagcaagttaagctactgtacaagcgacacaaaaacactgctttttcttggctgagaaacattttccatgactgtgctgtccagtcatgtgatgcttcactgctgctggactccacaagaaggagcttgtctgagaaggagacagacaggagctttggcctaaggaatttcaggtacattgagaccatcaaagaagctgtagaaagggaatgtcctgg

SEQ ID NO: 49192 - DNA, 406 bp, Gossypium hirsutum
  Clone ID: LIB3196-065-P1-M1-B6
atggcaagagtacctgggcccatgggcccaaactcaggtcctggctctcggggaattggccttccagggccaaatccatctcccatgtcaagggctcctggccccataggccctaattcagctcatttctcaaggccaggtggccccatgggggtaaatgccaattcctttcccaggggagcaggttcatctgccttttctcagtcttctggcacattggcatcaaacccagctaccttccaaaggtctgctggcctccagggctcaaatccaaccattttcccaagagcctctgggccacttggccccaacccagctaacttcccaagggccactggcctgcagggtccaagtccaactaccttcccaaggtctactggcccattaggccctggtcaagttactt

SEQ ID NO: 49193 - DNA, 397 bp, Gossypium hirsutum
  Clone ID: LIB3196-065-P1-M1-B7
atagatgataatcgtggccttgagcaaggtgtccaggataataagattacagctaatctatttcgaatactactagaaaaaagaagtgcagttaatacggaagaagaaaagaattcggtcagttatccttctctccttagccacataacttcttctttcatgaatcatccagtctttccaatgacaaataagttctcctcacctacccttgatctgcaaggtgaattctctccattacagtcatctttgccttgtgacattcatctggttaatctgagaacaatacagtcaaaggtgggcagtgggcattccaatgaggcagctttaatcctccacagaaaagggtttgattgtcggttctctagcaaaggcacagggctgttttgttctactactc

SEQ ID NO: 49194 - DNA, 384 bp, Gossypium hirsutum
  unsure (1)..(384): unsure at all n locations; Clone ID: LIB3196-065-P1-M1-B8
gtcaactgtcaaagtttctctctctctctctctctctctattgttgaagttcataagcttttgtatcaatggctgaagtccgtgaccgcaacctgcctcaccaagttcaagttcacccacagtaccgtttcgacaatacaaccggaggcggttacggtgcaaagaactatcacagtggaccatcaacaagccaagttctagccgtccttacacttctccccattggtggtacactgcttgcattagccgggttaacactggccggcaccgtcattgggctgatgctagccacaccgctgttcatcatcttcagcccagttcttgtcccagctgccattgccattgccatggcagtgacggngttcttgtcgtcggtggcgtttg

SEQ ID NO: 49195 - DNA, 370 bp, Gossypium hirsutum
  Clone ID: LIB3196-065-P1-M1-B9
gttctagtgaaaaagatagaatgggagccaaaaagaatgaaggttgccatagaattcataacacaaatgggaaatgcaaggcataggaatttgatcagattacttggtttctgctacaacaaccatatggcttatatgttgtacgattacttgcctaatggaaatttggctgagaaggtaacaatgcctagagattggtcaaccaagtgcagaattataactgggattgcaagaggactttgcttccttcaccatgactggaatcctgcaatttctcatggagatttgaactcaagtaccatagtctttgacgataatttcgaaccccgtttagctgatttcgggttcaagtatctgatagagttgatca

SEQ ID NO: 49196 - DNA, 382 bp, Gossypium hirsutum
  Clone ID: LIB3196-065-P1-M1-C1
cggacgcgtgggcgaaaatggggggaaattgttggaatattttcaaatatttatagtgttccaataactatatatgaaagggtgtaatatcttttggttattgatcaagagttatatcatctgatttttgacaaataattataactatacaagcaatattacttgaatagttatgagatatttgttgaataattatgtcttttaaatatgccattattcaaaaaagacatttatcgaaagttatgtctttatgaagagacatgagaattcctattaataggagtgatattttattcggaagatatacaaaaaatttttaaaagttctttctatccttcctctatactatactattataaaattgttctattaaaaattactg

SEQ ID NO: 49197 - DNA, 378 bp, Gossypium hirsutum
  Clone ID: LIB3196-065-P1-M1-C10
cgagtcatgaccgccggttgcacctatatccgactcattgagtcggtcactcggttcgtcttccattaacgacatgttaaggaatttacagcttgggaaagttaagttcatgcctattggtctttgatcatcaccttctccttccatgttcgggtcacccagagattcaatgatcctacacggattttgtagccttctcaacactccgacccagaacttgacccgtcatgggatcggcggatacttggatttatttgaaaaacggtgtgaagaagatgaaccagccatggaaagagctgaatgcggaagggatttacgtgcacaattatttgagaaattgagtaaagagaattgttcgggaaggggtaatccgggtca

SEQ ID NO: 49198 - DNA, 383 bp, Gossypium hirsutum
  Clone ID: LIB3196-065-P1-M1-C11
gtctttccaccccccaaagacctgcacaactgtctcttggacattccgcatattttacgagaaggcactgttagaatatgaaaagtataagagagagaatggtgagattcaacttcctgcttcttcactccctcatgcaagtggtgaaaaggagtcaagtggtttcctagccttggggtcaggtagggcacgcagggatgctgcagctcgtgcaatgcagggttggcatgctcaacgttctgttggatatggtgagattaccgagcccattgtgaaggagaaaatcatgggttctgctccgaaacgtgaaagacatctcaaaagtattggtttgcagaagcagaagatgccaataagcgcagagcttgataaatctgcacatg

SEQ ID NO: 49199 - DNA, 398 bp, Gossypium hirsutum
  Clone ID: LIB3196-065-P1-M1-C12
atcgcgggctggagaagcgggtcctacgcacgctttgttgcccgcgctttccctcggtccttccccctactcccgccttacctgacttacttttgggaggaagatccttgagcaaccaacggtgggacaaaggatttggcgaaacccagggctaaagtcacgtttttcctcctttaagccttacctcaacacttcactccatggcagttcccgagacccgccctaaccacactatttatatcaacaacctcaatgagaagatcaagaaggatgagctaaaaaagtccctgtacgccatcttctcccagtttggccagatcctggatatcctggtatcacggagcctaaagatgaggggccaggcctttgtcatcttcaaggaggtcagcagcgccacc

SEQ ID NO: 49200 - DNA, 380 bp, Gossypium hirsutum
  Clone ID: LIB3196-065-P1-M1-C2
gcgcatttcatttctacggctacgggatgacccgtcaagtcgaagcgcaccatttctgcgcacatcaaaacgaagaaatgcgacaatgtctcatatatgacacccccgaagccgatgcaaagctcatcgggttggagtacatgatatcggagaatttgtttttgacgttgccggacgaagagaagccgctttggcattcgcatttgtacgaagtgaagagcggggtgttgtttatgccgcgagttccggggccgatcgagaggcatggtctggacaaagtttgcaagacttatgggaagaccatccatttttggcaagtcgataaaggtgataatctccctcttgggttacctcaattgatgatggctctcactagagat

SEQ ID NO: 49201 - DNA, 397 bp, Gossypium hirsutum
  Clone ID: LIB3196-065-P1-M1-C3
atagcaaagagcaggtggccaactcagcttttgtggagcgagtgcggaaacggggcttcgaggtggtatatatgaccgagcccattgacgagtactgtgtgcagcagctcaaggagtttgatgggaagagcctggtctcagttaccaaggagggtctggagctgcctgaggatgaggaggagaagaagaagatggaagagagcaaggcaaagtttgagaacctttgcaagctcatgaaagaaatcttagataagaaggttgagaaggtgacaatttccaataggcttgtgtcttcaccctgctgcattgtgaccagcacctatggctggacagccaatatggagcggatcatgaaagcccaggcacttcgggacaactccaccatgggctatatgat

SEQ ID NO: 49202 - DNA, 402 bp, Gossypium hirsutum
  Clone ID: LIB3196-065-P1-M1-C4
atcggagatcggcatagtaccccctccctcctggaggcagccttgacccaggaggcctcgactcctgacagtcaggtttggcccacagcacctgacattactcgtgagacctgcagcaccctggcagaaagccccaggaatggccttcaggaaaagcacaagagcctggccttccaccgaccaccatatcacctgctgcagcaacgtgacagtcaggatgccagtgctgagcaaagtgaccatgatgatgaggtggccagtcttgcctctgcttcaggaggctttggcaccaaagttcctgctccacggctgcctgccaaggactggaagaccaagggatcccctcgaacctcacccaagctcaaaaggaaaagcaagaaggatgatggggatgcagccatg

SEQ ID NO: 49203 - DNA, 383 bp, Gossypium hirsutum
  Clone ID: LIB3196-065-P1-M1-C5
gcgaggaattcaagggctatgttttcaagatcatgggaggttgcgacaagcaaggattcccgatgaagcagggtgttctgactcctggtcgtgttcggctcttgcttcatagaggtaccccatgcttccgtggatatggaagacgtaatggtgagcgtagaaggaagtctgttcgtggatgcattgttagccaagacctttctgttttgaacttggttattgtgaagaagggtgagaatgatttgcctgggctaacggacactgaaaaacctaggatgagaggtccaaagagggcctccaagattagaaagctctttaacctttcaaaggaagatgatgtccggaagtatgtcaacacttacaggaggactttcaccacaaaa

SEQ ID NO: 49204 - DNA, 386 bp, Gossypium hirsutum
  Clone ID: LIB3196-065-P1-M1-C6
atatgattcatcaaaaacttgttctcaaaatgttgagttgacagatcccattatttctcgatttgacatcttatgtgttgtcaaggatgttgttgaccctgtgacagatgagatgcttgcaaagtttgtagttgacagccacttcaggtctcaacctaagggtgctaatttagatgacaaagccttcagtgagtcccaagaagaagctcaagcctctgctaggccagatgattcaaagatactttctcaagaattgctaaggaaatatttaacatatgccaagttaaatgttttcccaaggttccatgaaaaagatatggctaagcttaccaaagtttatgctgatttgcgaaaagaatcttcccgtggacaaggtgtccctatag

SEQ ID NO: 49205 - DNA, 442 bp, Gossypium hirsutum
  Clone ID: LIB3196-065-P1-M1-C7
cgccactaaagaacaagagggaacgcaaaagcacgctggtgccccgccgcaatatccgggatggcggcgcaggcggccattctgatgggggacaagagcgagaacgtgcaagacctgttgatgctacacgaggcttctttgtcactgaagctggagacggtcggaggcgaaatgactgtcctgatcaagctcaacttcaccatccgcaccaagcaggcacaaagatgtaccacctactgaaacaaccaaccatgagcgctgatccaagtgtacgagggcgagagggacatgacaaaggacaacaatctggagctgcgcttgaagctgagcgtgataactgctgcccgcaggggcacgcccgagatcgaggagaccttcgacatcaatgccaacagactactgaacgagacggccacagacaagaacacctgcgaggtcaaca

SEQ ID NO: 49206 - DNA, 399 bp, Gossypium hirsutum
  Clone ID: LIB3196-065-P1-M1-C8
atgggcgcctgcagtctgagctgaagaccatgcaggacagcgtggaggacttcaagaccaaatatgaagaggagatcaacaaacgcacagcagctgagaatgactttgtggtcctcaagaaggacgtggatgctgcctatatgaacaaggtggagctggaggccaaggtggacagtcttaatgatgagatcaacttcctgaaggtcctctatgatgcggagctgtcccagatgcagacccacgtcagcgacatgtccgtggtcctctccatggacaacaaccgcaacctggacctggacagcattattgctgaggtccgtgcccagtacgaggagattgcccagaggagcaaggctgaggccgaagccctgtaccagaccaaggtccagcagctccaga

SEQ ID NO: 49207 - DNA, 374 bp, Gossypium hirsutum
  Clone ID: LIB3196-065-P1-M1-C9
tcggcaaaccccaacactttcgttctcccacaccattgtgacgcggagaaaatttacgttgtcactaacggacgaggaacaattacgttcgtgacacatgaaaacaaagagtcatacaatgtagctcctggagttgtagtaagaatttcagcaggaagcactgtgtacttggccaaccaagacaacagggaaaagctaaccatagcagtgctccaccgccctgtcaataaccctggacaattccagaaattcttcccttctggacaggaaaatccttagtcatatttacgaatcttcagccgtgaaattcttgaggctgtcttcaatacacgaagtgagcagctagacgagctgattggtgggaggcaaagcca

SEQ ID NO: 49208 - DNA, 396 bp, Gossypium hirsutum
  Clone ID: LIB3196-065-P1-M1-D1
atggatggaaggtcacccgtaaggatggcaatgccagtggaaccacgctgcttgaggctctggactgcatcctaccaccaactcgtccaactgacaagcccttgcgcctgcctctccaggatgtctacaaaattggtggtattggtactgttcctgttggccgagtggagactggtgttctcaaacccggtatggtggtcacctttgctccagtcaacgttacaactgaagtaaaatttgtcgaaatgcaccatgaagctttgagtgaagctcttcctggggccaaggggggcttaaatgtcaaaaatgtttctgtcaaggatgttcgttggggcacctttgctggtgccagcaaaaatgacccaccaatggaagcagctgccttaactgctaagg

SEQ ID NO: 49209 - DNA, 377 bp, Gossypium hirsutum
  Clone ID: LIB3196-065-P1-M1-D10
aattccagaaattcttgggtgctggacaggaaaatcctcagtcatacttacgaatcttcagccgtgaaattcttgaggctgtcttcaatacacgaagtgagcagctagacgagctgtttggtgggaggcaaagccatcgaaggcagcagggacagggaatgttccgtaaagccagccaagaacaaataagggcattgagccaaggagctactttaccaagggggaaaggtagcgagggatacgccttcaacttattgagccaaacccctcgctactccaaccaaaacggccgcttttacgaggcttgccctcgtaattttcagcagcaactccgagaagtggattcctccgttgttgccttcgaaataaacaaagga

SEQ ID NO: 49210 - DNA, 382 bp, Gossypium hirsutum
  Clone ID: LIB3196-065-P1-M1-D11
aaacctttgtccgtaaaaaaaacccttgtttttctctttgaaagatgtgggcaagttcagagggaggtgcaccagaggttactctagaaacctctatgggtgccttcactgttgagctatattacaagcatgcacccagaacttgtcggaacttcattgaactttccaggagaggctattatgacaatgtcaaattccatagaattatcaaggattttatagttcagggtggagatccaactgggactggaaaaggtggagaatctatttatggtcctgtattcgatgatgagataaggtccgagttaaaacatactggagctggtattttatctatggctaatgcgggtccgaattcaaatggaagtcagttcttcattac

SEQ ID NO: 49211 - DNA, 196 bp, Gossypium hirsutum; identical to SEQ ID NO: 47011
  Clone ID: LIB3196-065-P1-M1-D12

SEQ ID NO: 49212 - DNA, 401 bp, Gossypium hirsutum
  Clone ID: LIB3196-065-P1-M1-D2
atgttcaagagaaaacacaagaaggacatcagccagaacaagcgagccgtgaggcggctgcgcaccgcctgcgagagggccaagcggaccctgtcgtccagcacccaggccagcctggagatcgattccctgtttgagggcatcgacttctacacgtccatcaccagggcgaggttcgaggagctgtgctcggacctgttccgaagcaccctggagcccgtggagaaggctctacgcgacgccaagctggacaaggcccagatccacgacctggtcctggtcgggggctctacccgcatccccaaggtgcagaagctgctgcaggacttcttcaacgggcgcgacctgaacaagagcatcaaccccgacgaggctgtggcctacggggcggcggtgcaggc

SEQ ID NO: 49213 - DNA, 383 bp, Gossypium hirsutum
  Clone ID: LIB3196-065-P1-M1-D3
aagaacggttcattccacttgaggggaaatgtttacgtgcattataaatcactagaatctgctgtccttgcttatgattcaataaatgggcgatactttgctggcaaacaggtaaaatgtgagtttgtcaacattaccagatggaaggttgccatttgtggggaatttatgaagtcaagattgaagacatgttctcgtggaactgcctgcaattttatccactgtttccggaaccctggcggagactacgaatgggcagattgggacaaaccaccccctaggtattggatgaaaaagatggctgctttatttggatatggtgatgaggctgagtttgagaaacagagagagcaagacaattttgggcatttgaggaaccctaa

SEQ ID NO: 49214 - DNA, 375 bp, Gossypium hirsutum
  unsure (1)..(375): unsure at all n locations; Clone ID: LIB3196-065-P1-M1-D4
atttgtattaagaatcgccctttagtgatcagtgaggtgaagaaaaatgtcttgctgtggtggaaactgcggttgcggcttccgttgcaagtgccgcaaccgcttccgcggttgcaagatgtaccctgagatgaactttgctgagcaaaccacaaccgggacacttgttcttggcgtggcaccccggaaagtgcactttgatggagctgaaatggaaactgtggctgaaaatggctgcaaatgtggagataactgcacttgcaacccttgcgattgtgaatgagaaaaaaagctcagcatattatggaagctgatctaaataatatatgatgtatntgggtttttactattagaataaagcagctatggttcatt

SEQ ID NO: 49215 - DNA, 176 bp, Gossypium hirsutum
  Clone ID: LIB3196-065-P1-M1-D5
cggacgcgtgggtggaaatttagaatctctgattgtgtatttgattggtggttaaataagtgattatcgagttaatttgtcttttataaaagacctttcaattttcaatgttgtttaggttcgcaaacaagatgctgtatttggacttgctgttactaaaagacttgttgtatttt

SEQ ID NO: 49216 - DNA, 385 bp, Gossypium hirsutum
  Clone ID: LIB3196-065-P1-M1-D6
tgaggcactgctgcaagagttcaagactgattacaatcagactcactttgtaaggaacaaggagttcaaagaagctgctgataagattgatggtcctttgagacaaatcttcgttgagttcttggagaggtcttgtactgctgagttctctggttttctcctctacaaagaacttggaaggaggctgaagaaaaccaatccagttgtggctgagattttctctcttatgtcaagggatgaagccaggcatgccgggtttctgaacaagggtttatccgatttcaatttggcattagaccttggcttcttgacaaaagccaggaagtacacttttttcaagccaaagttcattttctatgccacttatttatctgagaaaattggg

SEQ ID NO: 49217 - DNA, 396 bp, Gossypium hirsutum
  Clone ID: LIB3196-065-P1-M1-D8
atgcagtgtgtggctttaaaaacttttagagatttttcagtcttagtgtgcaaactggcatttccgattttccaacataaaaatccacctgtgtctgctgaatgtgtatgtatgtgctcaatgtggctttagattctgtccctggggcttaacattgttggccctgacaggaagggaggaagcctggtgaatttagtgagcagctggcctgggtcacagtgacctgacctcaaaccagcttaaggctttaagtcctctctctgaacttgcatttccagcttcttcctttccaggtgagagaagaagcggggaagggttcagtgtagccactctgggttcatagggacacttggtcactccagagtttttaatagctcccaggaggtgatattattt

SEQ ID NO: 49218 - DNA, 383 bp, Gossypium hirsutum
  Clone ID: LIB3196-065-P1-M1-D9
cccacgcgttcggcgcggggggccaatccaaaccaagaataacatcaaactcgtcaaacggcaaaagcatcatagacagagaaatcgatgtcatcggaaaatgcagtaagatgaccagaagaccatttgagagaaacagagccaataaacatggaccagaaagcaagcaggagaattgcagccaagacccagaatttgtacccacttttacccaagaatccagcagttacggagctatctttcttcacaacactcggcgttgctagttgctgtgaagtgattggtattggcggtgttgtgggtgaaacttgctccttcattttcagttctcaaacacagctttcaagggcgtcccctggtttggctaaaatgtaaaaggcagt

SEQ ID NO: 49219 - DNA, 403 bp, Gossypium hirsutum
  Clone ID: LIB3196-065-P1-M1-E1
atgggtgatcactctacacccccaagtgcatatgggtcagtcaaagcctacaccaactttgatgctgagcgcgatgctttgaacattgaaacagccatcaagaccaaaggtgtggatgaggtcaccattgtcaacattttgaccaaccgcagcaatgcacagagacaggatattgccttcgcctaccagagaaggaccaaaaaggaacttgcatcagcactgaagtcagccttatctggccacctggagacggtgattttgggcctattgaagacacctgctcagtatgacgcttctgagctaaaagcttccatgaaggggctgggaaccgacgaggactctctcattgagatcatctgctccagaaccaaccaggagctgcaggaaattaacagagtctaca

SEQ ID NO: 49220 - DNA, 387 bp, Gossypium hirsutum
  Clone ID: LIB3196-065-P1-M1-E10
ctgcattcggggacagtccctgcgcgctctgggcgcaccatggcccgcggggctgcgctggcgctgctgctcttctgcctgctgggtgctctggtcgccgccccggatgatggtttcgatttatctgatgcccttcctgacaaagaaggcaagaaacccactgcaacccccaagaagcccagtgctggggatgactttgacttaggagatgctgttgttgatggaggaaatgacgacccaccaccaccgaacccacccaagccgaagccaaatccaaaccccaaccaggctggttcctctggtagcttctcagatgctgaccttgcggatggcgtttcaggtggagaaggaaaaggaggcagtgatggtggaggaagccacaggaaa

SEQ ID NO: 49221 - DNA, 375 bp, Gossypium hirsutum
  Clone ID: LIB3196-065-P1-M1-E11
attcaagcctcatttggccaagggagatgtaggagtattaaagggctgcacattcatgaactatggcttttcgtctaggctaagtatgcatgaatgcatcaagtgaagcaacatgatggttcggccaattcatgcaccatcttcaagcatgaaccaaattttaatgattttgtgtgaacatgttaaatataaatgtgaacagaatttaagttagtgtgaacatcatagatgccgaatatcaataggcatcttaggcttataaatagtttgttcatttcatgtaagagggactttttaccaatttgttaatgaacattgttcttgtgaggttgcttcctctcatatctcgtacaagtttcaaaagacttatctagt

SEQ ID NO: 49222 - DNA, 380 bp, Gossypium hirsutum
  unsure (1)..(380): unsure at all n locations; Clone ID: LIB3196-065-P1-M1-E12
ttttcattttcctaaacgaggtcgcttgtctatgataggaataatgaaaatagtaatttaatgagacgctcggagtttatccacgggatgcagtgtatctccgtctatgattcgccggatgagaaaagagatgataggtagctgctgctttctacggaggaagaggaggaagagagagacgatgatgagtcggngtcttgcagctcgctgccgataggaaggaacagcgatgattccggtgaatcaccatcggatgatgatgactcaccggaacctgaagtacaaagccagcttaaaggacctttggatacaatggatgctctacaggagattgtgcctttgagaaaaggcatatccaagttttataatggcaaatcaaa

SEQ ID NO: 49223 - DNA, 368 bp, Gossypium hirsutum
  Clone ID: LIB3196-065-P1-M1-E2
gctattcttcacaaaaaagaaaagaaaaaatacagtgaaaatggcaacccttaaggttccagctcatgtacctgccccttctgaggatgctgagcaacttcgtaaagcttttgaaggatggggtacaaatgagcaattgattatcgacatattggctcacaggaatgcagctcagcgcaatttgattcgtaaaacttatcgtgaagcttatggggaagatctccttaagtctttggatgaggaactttcaagtgactttgagcgagctgtggtgcttgttactttggaccctgcaaagcgtggatgcatatctggctcatgaagctacaaagaggttcacatcaagccattgggttcttatggaaaat

SEQ ID NO: 49224 - DNA, 383 bp, Gossypium hirsutum
  Clone ID: LIB3196-065-P1-M1-E3
cccacgcgtccggttggactcactggtggaccctcttcaaaagacaattaatttcaagcccaaacaagatgctgtcaaacaggaagtagaccgtaatgaagatatgatccgtagtgctcttcgtgcaatcgcatccttgaaccgaataagtgggggagatagcagtatgaagttgaagaatctcatgagtgaaatatcgaaatctccaacattatgggacaagtattactccatccggaacgagtgaggtaatcttctaattgtgtaaagtaggtaaaggtttgatcggattggatttatatccgaaaccaggggaacattgttgttgtgaaagatgataattgttggatattgagttggtttcatgtatgattgcatcctgc

SEQ ID NO: 49225 - DNA, 382 bp, Gossypium hirsutum
  Clone ID: LIB3196-065-P1-M1-E4
cggacgcgtgggtttttagactttatgatttaattcctatgtaaaaattcaacccaagcagcctattaaaagccttggccgaatttcccttttgaagttaataattaggtttttttttagtttcctaataggattaggaaaatagttagatggccaataataaggcttggccggccaccttatgaaaattacattgaattgtatattgaaatcagattttgttgagtgaaaattctctttgagttttctccaagaattttctcttgagttttctttggaagtagttttaacaatctttttgattgtgggagccatcttcagccttcttcttgccattgtcctacattggaggggagattagagccgtttgaagggagttgtg

SEQ ID NO: 49226 - DNA, 387 bp, Gossypium hirsutum
  Clone ID: LIB3196-065-P1-M1-E5
ggttacctttcattggtccaatcaaagaccggctcgattatttctacaaccaaggtcgggacaaatttttcaaatccaaaattcaaaaataccaatcgacagtaatccgaaccaacatgccaccaggtccattcatcgcttcgaaccctaaagttattgctttacttgacggaaagagctttccaatccttttcgacgtatcaaaagtcgaaaaagaaaaccttttcactggtacttacatgccatcaaccaacctcaccggcgggtatcggattttatcctatcttgatccgtcggaacccacacacactatgctcaaacaactacttttttttctcttgaaatcgagtagtaaccgagttttccctgagtttgaagcgtgttaca

SEQ ID NO: 49227 - DNA, 387 bp, Gossypium hirsutum
  Clone ID: LIB3196-065-P1-M1-E6
aaacaatcctaaaagaaccgtaaagaaagcaatttcagaacaaaactctcttcatgtttagcaatattaaaaattaggatttttctagtttaatggatctgctatggtatgccaatattggtagtttacagagagttaactagagaggtttaatattaattgaaattacacttcaattgaaaatagctggccagtcgatcctagtgtcctaaagacactaaactgccacagattatgcctcccttaggcagcataagcttactagctccgcaagtagcttcccttcaccatatggtcgacttgcgttaatttgggtcacatattaattttgaataagaaattaaaattatcgattaaataattttcaaagattctattttaacccat

SEQ ID NO: 49228 - DNA, 374 bp, Gossypium hirsutum
  Clone ID: LIB3196-065-P1-M1-E7
tggtgaaagtgaaaatggaggtttacagcagaaggctaatggttctggtgtttgcatttgcactagtaagcatagggtacgcgcaagagtcgaactcgaccactctggttccagcaatactgacttttggtgactcagtggtagatgtgggcaataatgattatctccccaccatcttcagggctaattaccctccttatgggagggacttcgccaaccaaaagcctactgggaggttttgtaatggcaagttggccactgacatcactgctgaaactctggggtttactacttatccaccagcatatctaagccctgaagcatcagggagcaaccttcttattggagccaattttgcttcagctggatctggc

SEQ ID NO: 49229 - DNA, 378 bp, Gossypium hirsutum
  Clone ID: LIB3196-065-P1-M1-E8
tgccgtccagccaaaataaagtttgggtctaattgccttttaaatcctctctcattagacacttaagctatttaatcatctcatccacttttacaccttttacaatttagtccttttcatttaattaactatccaaacatcaaaatttcctaacacaattttaataccacattacaaacatttcataaatgtttaaaaaattattttcgactaggtcttacgagatagaggtccttgtactttattttacccaatttcttcaatagatttcttgttctcactaaccattaaatcaataaaaactttttatcaatattttcatacgatgttgctattatatcaattttcatgcaaaaatattgaaatagatctctcttt

SEQ ID NO: 49230 - DNA, 371 bp, Gossypium hirsutum
  Clone ID: LIB3196-065-P1-M1-E9
cggacgcgtggggcctggccgtgtggttcaatttatttgctgatgtcataaacagaaagttacacggcctaaggacacgagcatgcccctgtgtccacacgggcttgtgaccctgtttcacgagaaaaatttctaaatttttcccagagctttccaaagtttttggtttagtcccaaaccctttctaaagtatgttttgggcttcgtaaacccaaataaaggactatgtccatgtgattgaaatgttttaaaatatgaatgaaattttatggcccgatttgcatgattgtttgcgtttaagtccgctaatgcctcgtatcctgtcccggcgttagacacaggtagggggtgttacaacaacatacccacac

SEQ ID NO: 49231 - DNA, 405 bp, Gossypium hirsutum
  Clone ID: LIB3196-065-P1-M1-F1
atcagatttacagaaaagtgaagaactaatcaaaaaagaaatgatcacaatgcttcattatgaccttctacatcacccttatgaaccatctggaaataaaaaaggcaaaactgtagggtttggtaccaataattcagagcacattacctacctggaacataatccttatgagaagttctccaaagaagagctgaaaaaggcccaggatgttttggtgcaggagatggaagtggttaaacaaggaatgagccatggagaactctcaagtgaagcctataaccaggtgtgggaagaatgctacagtcaagttttatatcttcctgggcagagccgctacacacgggccaatctggctagtaaaaaggacagaattgaatcacttgaaaagaggctcgagataaacag

SEQ ID NO: 49232 - DNA, 381 bp, Gossypium hirsutum
  Clone ID: LIB3196-065-P1-M1-F10
aattgtttgtgatgcttaaaacttactaagctttgaaagcttactctgttctttatttctctattttatagattgttgattttggccaccgactcggggatcgtcagtagttcatcacactatcgatctttttggtacagttatattttggactcgatatggcatgtataggttaggctgatgataacgatgttttgaaattgtaaatattttgggccatacgaaaatggcgtataacttaaatatcagtatgtatttcagttcgatctctgtttatgcttattgacaatgtgaatgagataattaaatgtttagttaggtaatacctcttagccttaatccggcaatgggattcgggttaggggtgttacattttattgg

SEQ ID NO: 49233 - DNA, 395 bp, Gossypium hirsutum
  Clone ID: LIB3196-065-P1-M1-F11
atgcccagcttaccaggttgaagggtacaaacttctcaaatcttcaaaacattttagtcaaagtgcaatatacttaaatttcacctaaaatatctttggcgtgcttgttagaaattcctgattcctgttactaatcactaaagaaatgggatgctgccactgtaggatttaagcagtggtgcttctgtactcttagacttctgctgcctgcaccttcgtcagctttgacgcctcttttctgatttaaagacaccaaggaaaactacaactctctttagctttgaagcagttttcatgtaatcaatgccacctcttccctacatgaactattgataccagcatacaagtgtatagcactttacacacaagaggtttattgatgtaaaattgtcagc

SEQ ID NO: 49234 - DNA, 293 bp, Gossypium hirsutum
  Clone ID: LIB3196-065-P1-M1-F12
ttacgatagaacgtatagctctactgcagcaccacggcataagctatttagtgaactgtgcaggagaacaccttgcccctcgcggcctgggggcctctgatcacttggacctctaggatttgagactggtaagatgggaaaaccaaccatatgcattactgaccttgcctgaccactgctacccatctgtactgacagtataaggtgctccaactgaaggtgttagtatcattgcaatacaagatactgcacctgctgctttgctaagatatgaataagacacttgagctgct

SEQ ID NO: 49235 - DNA, 384 bp, Gossypium hirsutum
  Clone ID: LIB3196-065-P1-M1-F2
cggacgcgtgggcggacgcgtgggcgaagctagggttttgcagggagctttaaaacgacaatgacgaccttcgttcccacctccgaagaagatcccgtcctccccgtagtccgattcacggccgacctctcttgggctgatgccggtcctgaggttgcggaaccgcaagtgacgagtctttgtatggaagcgcaagagtgtatggtgatgggaagatggttggatttggcttctttaatgcttacttctgctgagttggtctttcccaaggtgtctgataaagatctcgaatgtatcttcactgttatctgcaatctagcctcaaagctcgaaaatccagatgatgaacttgagatggcaaagctcatatctacaaaaatcagt

SEQ ID NO: 49236 - DNA, 384 bp, Gossypium hirsutum
  Clone ID: LIB3196-065-P1-M1-F3
gggcaatcaggtggttggacttctgctgaggatgaggctgatcctatggatcatgatgaagaagatcggaatagtaagagttttaaggagcaaaggaaagcacactatgatgagtttttgaaaataaaggaactgcgacgtaagggttctttcattgaggatgaagatgatgaagtggagggtgattcatcatcatcattaagctctggtgtcaaagacataggaattggggaaggtcctgcaagtttgccccaaaagtcttctgcaagtcctgggcatccaggtaatggattgtgattgtagaagtcatccgaccagtcaaagacgcaaaagctcgctcttttgacattctttatggttgtttgatgtttattttgatgcacc

SEQ ID NO: 49237 - DNA, 383 bp, Gossypium hirsutum
  Clone ID: LIB3196-065-P1-M1-F4
cggacgcgtggggtgatggcatccgggtggggaatcaacggtaacaaaggcaggtgctacgatttctgggtcgacttcagcgagtgcatgtcccgttgcagagagcccaaggactgtggacttctccgtgaagattatctcgagtgcctccaccattctaaagaatttcaacgaaggaatcgaatttataaggaggagcaacgtaaattaagagctgccgcacgaaaagacaaggaaggcgaaaatggtgttcatcatcatgcatagtcataatttgtgatcctttaattttccaataataataatgcatggagattgttgtatttatgttgggattgatattttaactctttgctaaataaccttttgggtttccctttcgt

SEQ ID NO: 49238 - DNA, 389 bp, Gossypium hirsutum
  Clone ID: LIB3196-065-P1-M1-F5
aaagaatttttcagaaaatattaaaatttttcaaaggtgcaaggaaaacacgcccgtgtagtcaggccgggtggctcacacggtcaagagacacgcccatttctcaggccgtgtggacattcgaatagggacacacgggcatgtcctagcccgtgcccaaacttatatgctctttgactttggtcacacggccaagccacacacccgtgtgctagactgtgtgagcatactgacttgcattaataagatgcaggggtcacatggccaagccacatgctcgtgtgctatgccgtgtgagcattctgttttgcactaattaaaagatacaagggacacacgaccgtgacacctagccgtgtgttttacacggctaagacatacacccgtgt

SEQ ID NO: 49239 - DNA, 390 bp, Gossypium hirsutum
  Clone ID: LIB3196-065-P1-M1-F6
gtaactttaggttcgagattgaacgcttctataatcttacgactcctgatacaccattgacatcgacaccaccaccagcaacatccccgccatcaaacaacaccaaaaatacaacaggaaaaaagagtaattcgtctcgaactattatcatcgcatctgtctcagctgttgctttggtggtacttgtagtttccagctgcatcttcatctttttaagggtgaggaagtcaaaggtgaaagctgaaaaaggtggtgaggcagctgaagcagtggatgaaataaaaaatgcagaggctttgcaatatgatttcagcaccattagtgctgcaacaaaccacttttctaattcaaatatgcttggacaaggtggatttggtgcagtttataagg

SEQ ID NO: 49240 - DNA, 426 bp, Gossypium hirsutum
  Clone ID: LIB3196-065-P1-M1-F7
acaagagggaacgcagaagcacgctggtgccccgccgcaatatccggggtgggacaccaacctccgctggcggctgacgatcaccgggctggtgctgcaggtagctatggtgatgcttttatgaggggtcgggcgctacaacttgaatgcctgctcccactggcggacagagagaaagcacaagaactagaacgaggcggaaaacgaatcactactatgactccccaagctaacatgacgtgcacgtcatggtcttaacgggcttaagattgctcatgaccttactgcatcgattcggattaagagctatcggttttaactttctgatcacaggctctagaatgcaatgcacgctgctcatgcaagactatgatcacctattagaaagtccctgcatcttcaagggagcggagaatctcatcaagg

SEQ ID NO: 49241 - DNA, 378 bp, Gossypium hirsutum
  Clone ID: LIB3196-065-P1-M1-F8
ctttcttcttcttgcttgtcgatgtataaccaggtatcatgcaatagaaaattcctcaaattcctggaggtattggcttgggcctagaaacggaagatcaggtaacccgtgaatccaacgagttggtttataataattcatgaaggaaattatcatatttccgcaagtcaattagatgcgaaatataaaaattgactttttttcgtagttgcacaagaggttttgttttttgttggaagccctcttttttttttatctatatctaacgactactcttacttgttactagacgactaagcaattccttaaaataaaaataaaaaaaaaagaggaaggaataaaaaaaaattctactaaatttgtgaggcggcctttctt

SEQ ID NO: 49242 - DNA, 385 bp, Gossypium hirsutum
  Clone ID: LIB3196-065-P1-M1-G1
gtttgctacagttttatgcctatcgcacatagtttcaccatctcgatggaacggatgctcttgttcatgattgtgctaaaaagaagaaaggaagtgcttatttcccatcattaattacttcactttgcttaagggctcgtgttagaacacaagcaaatctgaaggggcagtatgttcaatgatgcattacaaattatgatcttgaaagattagtagagagggtgcatgaattgaatcaaggcgagcaagaagagccaactgagtcggatacagaggagtcaacagatggaactgaaactgaagctaattcagtcacagacactgaagaggaacaatctgataaggaactgaacattcttgaaccaagggttgtgccagaagaaga

SEQ ID NO: 49243 - DNA, 372 bp, Gossypium hirsutum
  Clone ID: LIB3196-065-P1-M1-G10
cccacgcgtccgaggaaccccacttgttttctttcttcttctcaccccttcttttttccctagaaaaattttaaaaagtttttccaagaaagtttctccctttttttttttcctattcttctttctcccagaactggctccaaatgatcaatattgatcaagaaacaacggttagagaaatcaaaccaaaaagcagaagaatcatgggaggaggtggtccggattatgatgatgataaagaggaagtgaagtggccgccatggctgagaccactgctacaaacaagcttttttgttcaatgcaaactccatgctgacgctcataagagtgaatgcaatatgtattgcttggattgcatgaacggtgctcttt

SEQ ID NO: 49244 - DNA, 398 bp, Gossypium hirsutum
  unsure (1)..(398): unsure at all n locations; Clone ID: LIB3196-065-P1-M1-G11
atgcgacatcaaggagaagctgtgctacgtcgccctggacttcgagcaggagatggccaccgccgcatcgtcctcttccctggagaagagctacgagctgcctgatggccaggtcatcaccatcggcaatgagcggttccggtgtccggaggcgctgttccagccgtctttcctgggcatggaatcttgtggcatccatgagaccacctttaactccatcatgaagtgtgacgtggacatccgcaaagacctgtatgccaacacggtgctgtctggtggcaccaccatgtacccaggcattgccgacaggatgcagaaggagatcactgccctggcacccagcaccatgaagatcaagatcatcgcacccncagagcgcaagtactcagtgtggatcg

SEQ ID NO: 49245 - DNA, 357 bp, Gossypium hirsutum
  Clone ID: LIB3196-065-P1-M1-G12
gtagagatgaggaaaggcatgggtgccaaagttcttttcttctttgctttgctttccttttcagctgtctcggcatttgcacaggatgaggaagaccaaggtcttgttatgaacttctacaaggattcttgtcctcaggctgaagacattatcaaggagcaagttaagctactgtacaagcgacacaaaaacactgctttttcttggctgagaaacattttccatgactgtgctgtccagtcatgtgatgcttcactgctgctggactccacaagaaggagcttgtctgagaaggagacagacaggagctttggcctaaggaatttcaagtacattgagaccatcaaagaagctgta

SEQ ID NO: 49246 - DNA, 385 bp, Gossypium hirsutum
  Clone ID: LIB3196-065-P1-M1-G2
ctctttgaaaataaaatgccgccattaacgtctctgcaactccgtcggctgcttcaccgttgcgtctcttcgccttctccctttcagccccatgctttgctttctccgaaacctcaatttacgcccacccatttccccaaattgccatttgtgatctctaaacccttctccacccagaaccctaaccctcaaaccccagatccggttgctttatctatttcggctgaactcctcaaggacccttctttagaccctctcactatcacccctagactccagcttcacttttctcacatcaaaccaacccctttgttaatctcccagaccctcaatctctcccctgaagctggccgaaccgttttagggtttaacgattgggttttat

SEQ ID NO: 49247 - DNA, 403 bp, Gossypium hirsutum
  Clone ID: LIB3196-065-P1-M1-G3
atcgccgacctggaggtgaagatccgcgactggtaccagaggcagcggcccagtgagatcaaagactacagtccctacttcaagaccatcgaggacctgaggaacaagatcattgcagccaccattgagaatgcgcagcccattttgcagattgacaatgccaggctggcagccgatgacttcaggacaaagtacgagcacgaactggccctgcggcagaccgtggaggccgatgtcaatggcctgcgccgggtgttggatgagctgaccctggccaggactgacctggagatgcagatcgaaggcctgaaggaggagctggcctacctgaggaagaaccatgaggaggagatgcttgctcttcgaggtcagagcggtggagatgtgaacgtggagatggatg

SEQ ID NO: 49248 - DNA, 401 bp, Gossypium hirsutum
  Clone ID: LIB3196-065-P1-M1-G4
atcccattataggttgtctccggatgctttcatccaacagagttgaatagttataacacagactgtgtggcccaaaacctataaagtatttactgtctggtttcctggcttaatctgttgttgaaaccttgagttttagaagaagtcttcatgtttactaaattctttttcttgtttttgggcaggcagagaacatttataatgatgaagaccctgaaggaagcgtggatccagaaggacaagggtcctagatatgtctttacttcttgtgattttagactccccttttttcttctcaaccctgagagtgatttaacactggttttgagacagactttgttcagctatccctctatataataggtaccaccaataatgctattagcccaaacagtgggtgt

SEQ ID NO: 49249 - DNA, 304 bp, Gossypium hirsutum
  Clone ID: LIB3196-065-P1-M1-G5
gcgcgcacgcgttacgtgaaaaaaaaaaagcctttggtctatgaaactatggtcccttacttgaggctaggatgcattggggtgggcagactagagttgaaaggtgtcaaacccagatcacagggctgaacatgtaaagaggcgtggaacgaaggagactcgaggaagagtgacaaggttgtagacagacatggataatagccgcggggtacagtgcgatgttagggatggacagagacctgtgatagacaaatttacagcaattgaagccgagatgctatgcatttaagagagaaactagatt

SEQ ID NO: 49250 - DNA, 384 bp, Gossypium hirsutum
  Clone ID: LIB3196-065-P1-M1-G6
cggacgcgtgggcaccttggctctgatgatcgggtcaggcatggggtgttacataatatattaataaatgtaaaagaagaagaagaataagctattgcctccttccttcttcctgctatacttgattttttctattacttcaacaggttcttcgcaggtaaatgttttccttgattttattttttccctagctacaagattgatttagcacttgtatttgtatgaaatacttaatttatttttgtaggaaatggatcaaattgttccatttaagttgtgtaggaattgtatgttagagaaagcctatggtttttcattgatatgatttaattatttgtaattttgctaagagtagtacttggaatcaactatttttcttatatt

SEQ ID NO: 49251 - DNA, 376 bp, Gossypium hirsutum
  Clone ID: LIB3196-065-P1-M1-G8
gcgggattccccgctgggtgtaagcatatcaataagcgggggaaaaccaacccttccggggatttggaagtttagggtaaaacggaagtgctgctcccggttgtaattgagtcctctactgcttcttttgagggagtagccggggcctcggcctcggcggttttaaagctcccaccttttgaaactaataaaatttaaccctttttttttggaatcttggttagttagtctcagattcattgtagggatgccggccctggcttgctgcgtagatgctgctgccgtagcgcctcctggttacgcggctttctttgctggggacagctccctttcctcggcggtcccttttttcgccttcaccgccgacgccgctgat

SEQ ID NO: 49252 - DNA, 383 bp, Gossypium hirsutum
  Clone ID: LIB3196-065-P1-M1-G9
caagtcctaaagctcaagctacattagtattgagtgttggcagtgtgagaaactgtaacaccctaaacctatatccgtcaccggaacaaagttacggagtattaccagaactttcagaatattttcaaataatttgcaacaatcactagtcacttttcgaaattatttgtaacgtctcttaaatagaccctcgaggccctgtaacacccgtaacccgtattcgtcgccagaatagggttacaaggcattatcgaaatatgcacatcattctcatgcatttgtgcattcataatcaaaatccattcaaaacattcaggaatacttaaggtacaaatatcacgacattcgggttaatgaaatcccgtataagactatatctggga

SEQ ID NO: 49253 - DNA, 397 bp, Gossypium hirsutum
  Clone ID: LIB3196-065-P1-M1-H1
attggctccaccagggtggtcctggtagacagaaagacaggcagtcagtatgatattcaagatgctattgacaagggccttgttgacaggaagttctttgatcagtaccgatccggcagcctcagcctcactcaatttgctgacatgatctccttgaaaaatggtgttggcaccagcagcagcatgggcagtggtgtcagcgatgatgtttttagcagcacccgccatgattcagtaagtaagatttccaccatatccagcgtcaggaatttaaccataaggagcagctctttttccgacaccctggaagaatcgagccccattgcagccatctttgacacaaaaaacctggagaaaatctccattacagaaggtatagagcggggcatcgtcgaca

SEQ ID NO: 49254 - DNA, 403 bp, Gossypium hirsutum
  Clone ID: LIB3196-065-P1-M1-H10
atcctggaccaaggcccacatgtctttttgatcactcacctacccaaagtatccagtccaaaggcccttgtaaatatgtgtcaagtgagtgaacggataacaatccttgtctccctctacctgtcacgtgcatgcccgctgggctgtttttctgtgtgaacatatacctgctctatgtgcctgcacgccactgtcttcaggtcacagtttccttagttcatggacatcccttgctccagtgtcttggctaacactgggtccagggcttctgctgtttggaggatgtaatcctgaccttaaacctatgaggccatggctgtcagcacctaagctcacaggtaatggagcgacacagcttaggagacttctgtgagagtccacaggccgtccgtctggaagatga

SEQ ID NO: 49255 - DNA, 375 bp, Gossypium hirsutum
  Clone ID: LIB3196-065-P1-M1-H11
gtaaatggcgccgttcggaagggcatgccccacaaattctaccatggccgcactggtcgtgtctggaacgtcaccaagcgcgccatcggcgttgaggtcaacaagcaggtgggtaaccggattatcaggaagaggattcatgtcagagtggagcatgttcagccttcaaggtgcactgaggaattcaaactgaggaagataaagaatgatcagctcaaggcagaggccaaggcaaagggtgaggtgattagcacaaagaggcagcctgagggcccaaaacctggtttcatggtcgagggtgcaatgttggaaacggttactcccattccatatgatgttgttaatgatctcaaaggtggctactagatctactct

SEQ ID NO: 49256 - DNA, 123 bp, Gossypium hirsutum
  Clone ID: LIB3196-065-P1-M1-H12
cgccacccccgtgtctcggagcggccagtctcgtcgtccctttgcccgtcgggtggggtgagatgccgggatcaacctcttcgaggcaaagcgaacaaacccccggcgcgaatcgcgccaagg

SEQ ID NO: 49257 - DNA, 387 bp, Gossypium hirsutum
  Clone ID: LIB3196-065-P1-M1-H2
gcgccgagaggggtgtcctctacaacagagctggtttgattccacaatggaacgtcaacgctcacaaaatactctacatgttaagaggctgtgccagagtccaagtggtgaaccacaacggcgacgcagtgttcgacgataacgtggagcaaggtcagctcctgacggtgccacagaactttgcgttcatgaaacaagcaggaaacgaaggagccgaatggatttccttcttcaccaatagcgaagccaccaacaccccaatggctggaagtgtctccttcatgcgagcactgccggaggaagtggtggcagcgtcgtatcaggtgtcaagagaagatgcaaggcggattaagttcaacaacaaaaacacctttttcttcactcctt

SEQ ID NO: 49258 - DNA, 378 bp, Gossypium hirsutum
  Clone ID: LIB3196-065-P1-M1-H3
atctcgaagcttccttttccgttttagatctcaaaattcaaaaagctctctttttcatctcatggctgctactatcgtctccgtcaaagctaggcagatcttcgacagccgtggaaatccaacggttgaggttgatgtggaaacatcgaacggtataaaggctagggccgcagttcctagcggtgcatccactggaatttacgaggctcttgagttgagagatggaggttccgattacctcggtaaaggtgtatcgaaggctgttgctaatgttaacacaatcatcggccctgcattgattggaaaggacccaaccgagcagactgcaattgacaatttcatggttcaacaactggatggaacccaaaatgagtgggg

SEQ ID NO: 49259 - DNA, 390 bp, Gossypium hirsutum
  Clone ID: LIB3196-065-P1-M1-H4
cttctcccaccgaagagaatcaaggatcccagtgcaaagaagcctgaagattgggatgacaaggaattcatccctgatcctgaagacaagaagccagagggttatgatgacattccaaaagaaatccctgatcctgatgctaagaagccagaagattgggatgatgaagaagatggtgaatggacaccctcaacaattcccaacccagagtacaatggcccatggaagcctaagaaaatcaagaaccccaactacaatggcaagtggaaggctccaaaaattgacaacccagacttcaaggatgatcctgatctttatgttttccccaacttaaagcatgttggtattgaattgtggcaggtaaaatctggaacattgtttgataatatc

SEQ ID NO: 49260 - DNA, 404 bp, Gossypium hirsutum
  Clone ID: LIB3196-065-P1-M1-H5
atgggagactgacttattgtcttcttccttggtatttctgtgtacatttgtgctgtccttttatttatggtatgttgatttttagaatgagttgtgaaattttttgggacagtgtaaaaatctcttgttgactgtggaagaactcttttctccagagccatttgggtctggttccctttaaaaaagttatcttttcaattttctgtattattattgatttatttagttttataagatgaaaagtaaattgcgatcatttaagttttcctagaaaaattattctttatgttcagatttccacattgatacagagttaagcagtgccatagcttctttgttggtgttgttgttttgttttgagacggagtcttgctctatctcccaggcaggctggagtgtaatag

SEQ ID NO: 49261 - DNA, 385 bp, Gossypium hirsutum
  Clone ID: LIB3196-065-P1-M1-H6
ggtgacaatactttgataggttattggccagcggagctatttactcacctagcagaccgggcaaccatggtggaatggggtggtgaagtggtgaactcgagggccaatggccaacacacctcaactcagatgggttccggtcattttcccgaagacgggttcggaaaatcgagctattttcggaacttagaggttgttgatgcggataatagcttgagttctgttcgtggcatatcaaccctagctgaaaatacaaattgttacaacatcaggagctcatataacaaggaatggggcacatttttttattatggggggcctgggaataacccacgctgcccttagatcaatattattgtttgaattaaatattgattcttttaat

SEQ ID NO: 49262 - DNA, 379 bp, Gossypium hirsutum
  Clone ID: LIB3196-065-P1-M1-H7
cccacgcgtccgctaacattctgttggacaaggattttgaggctcatattactgattttggcattgcgaaaagcttatgcatctcaaagtctcacacttccacttacatcatgggcactattggttatatagaccctgaatatgcccgcacttcccgcctgactgagaagtcagatgtttacagctatgggattgtcctactcgaattactgactggaaggaaacctgtagacaacgaatccaatctccatcatcatcttttgtccaaggctgccaataactctgtcatggaaactgttgatccggagatcactgatacatgcaaggatcttggagcagttaagaaaagttttcagctagcccttctatgcacaaagag

SEQ ID NO: 49263 - DNA, 399 bp, Gossypium hirsutum
  Clone ID: LIB3196-065-P1-M1-H8
atgcgaggcaagcgagaggtctgcgcgcagtctgagcggcgcgcgtccagtcccgaggcccacgccagcacgccctcatggcccccgcagcggcgtcggggggcagcaccctgcccagtggcttctcggtcttcaccaccttccccgacttgctcttcatctttgagttatcttcgggggcctggtgtggatcctggtggcctcctccctggtgccctggcccctggtccagggctgggtgatgttcgtgtctgtgttctgcttcgtggccaccaccaccttgatcatcctgtacctaattggagcccacggtggagagacttcctgggtcaccttggatgcagcctaccactgtactgctgccctcttttacctcagcgcctcggtcctggaggccct

SEQ ID NO: 49264 - DNA, 377 bp, Gossypium hirsutum
  Clone ID: LIB3196-065-P1-M1-H9
gttcattgtgggggatcttgacagcgtttataccacaccagggatgaaggaatatgttaatggtggagatttcaaaagagatgcgcccatgttggaagaagttgtgataatggagggcgttggtcatttcatcaaccaagaaagagctgatgaaatcaactcacacattcatgatttcatcaaaaatttctgatctgctttgttttatctctatgctcaaagctgctttgtttatctcttttgagttttattaatgtgatttctcatgttagattctatgaaccaagtttgaactttaagaaatcataaaaaagtgcttgaagaataattcagacctaaaaaaaaaaaaaaaaaaaaataaagggttgtcgttctaa

SEQ ID NO: 49265 - DNA, 803 bp, Gossypium hirsutum
  unsure (1)..(803): unsure at all n locations; Clone ID: LIB3196-057-P1-M1-E3-F24
gggtgcggctgatccgggcactgctaatcttcgcccaactctactggctctgtgttgcattccttgcgtttgatgttatgtttgttgtcatttgcgtagcggttgctagtcttattggtattgctgtttgttgctgtttaccttgcatcattgcgatcttgtacgcattagcagatcaggaaggtgcaccggatgaagagatagagaggcttttaaaattcaagtttctcacagtaaagaattctgagaaagtgaatggcgaaatacgggaaactcaaggagggataatgactggattagataccgagtctcaaaccgaacgtatgttattaagcgaagatgctgaatgcagcatttgtctatgtgcttatgaagatggagtagaactaagggagcttccttgtagacaccattttcacagtttatgtgtagacaaatggctaaggatcaacgctacttgccctctctgcaaattcaatatcctcaaaaatggtgaacctagtggcagtgaacaagtgtgatgaggagaaagattttgctgttcaatctttgtggaatgtgatgagctcatcatcatcatttacttcaaagcctgtttgttcttttgaccattacagaggaaagaacaagaaagaagaccttgagatttgttttgagatgaagctgcacatcttgtctttntggatatgatatttgtaaatgcaataagtatatatagttcgggttggaagatgttattcatcgagtcagttgtgattttagcccgtttggtgtttttaagcaacggattaattagattatgt

SEQ ID NO: 49266 - DNA, 427 bp, Gossypium hirsutum
  unsure (1)..(427): unsure at all n locations; Clone ID: LIB3197-001-P1-M1-D12
cagaaaagaggcggagaattgtgattgtttgcagggttttcaagtttgtcattcattgggtggcggtactggatctggaatgggaacccttcttatttccaagatcagggaggagtatccagatcgcatgatgttgacattttcggtcttcccttcgcccaaggtatccgatacagttgttgaaccatacaatgctaccctttctgttcatcagcttgttgagaatgctgatgaatgcatggtgttggacaatgaagctctttatgacatctgcttccgcaccctcaagctcgccactcctacctttggtgaccttaaccacctcatctctgctaccatgagtggtgttacatgctgtctacggttccctggacagctgaactctgatctccgtaagctggccgntaaccttatccctttccctcga

SEQ ID NO: 49267 - DNA, 248 bp, Gossypium hirsutum
  unsure (1)..(248): unsure at all n locations; Clone ID: LIB3197-001-P1-M1-D2
tcgcccacgcgtncgctcctcttgttcagtctcctttttatttccataataagatcacaatttttttctcatttattttttattttcacttcattttttctcagctttaaccaaataagaagaaaaagattcaagtaatttataccttatggaatatgatacagagaaaacatgaagagaattcaagccaatcgataacatttcatcacctacctgttcttcttcggttcagaaacttctgttttttg

SEQ ID NO: 49268 - DNA, 458 bp, Gossypium hirsutum
  Clone ID: LIB3197-001-P1-M1-D7
ctctgcctctatccagattgattgaattcatgaagggcaaggaggataagattgcagtggtagttggaactgtcaccgatgacattcgtatatatgaagttcccgctctgaaggttactgcactaaggttcactaagacagcgagggcgagaattgacaaggctggtggggaatgtttaacatttgaccaacttgctcttcgagcacctcttggacagaacacggttctcctttgaggtccaaagaatgctcgtgaggctgtgaagcacttcggacctgctcctggtgtgccacacagccacaccaagccctatgtgcggtcaaaagcaaggaaatttgagagggctagaggaagaaggaacagcaaaggcttcaaggtttgagattccaactgcactggaaaaaaaaaaaacttatcaacccatcatgataatgggaatgctcaggttttgtttttt

SEQ ID NO: 49269 - DNA, 368 bp, Gossypium hirsutum
  Clone ID: LIB3197-001-P1-M1-D8
gaaagatgaagaaaacccaaaaaacaaacaaagagaaagaatcaaacaccaaaacccgaaccaaagaatcggagatatttgcttcgtgttcattctccagtcttggcctccactccactctgtctgaacaactacaagaaaggttgggttttgaagctccaactcttgtccaagctcaagctattcctgttatactctctggtcgtcatgtacttgttaatgcagaaacggggtctggcaaaacaatagcatatttggctccaatcattcattacttgcagggttacaatccccgaattgagcgttctcacggtacttttgcgttggtccttgtaccaacgcgtgagttatgtttgcaggtgtatgag

SEQ ID NO: 49270 - DNA, 464 bp, Gossypium hirsutum
  Clone ID: LIB3197-001-P1-M1-D9
tccacgcgtccggtttttccaatcgacctccggaccttcagatccgaccaacgttgcaccaccgccatgttatcctccgtccgctctttctctctttccgccttcattttcttcgtcttcttctcctctctcgccttcgcttccgagtcagatcataagtatcagccggatgatccaattaccctatgggtaaataaagttggaccatataacaatccacaagaaacttataactattacatccttccgttttgtcatccgggtgtcaatcctgcgcacaaatggggtggccttggtgaggtccttggtggaaatgaactgattgatagccagattgatataaagtttcaaaagaatgtggacaaaggtaccatttgccaactggaacttgatgaagctaaagtcaagcagttcaacgatgctatcgagaacaattattggtttgaattctttgtggatgatct

SEQ ID NO: 49271 - DNA, 445 bp, Gossypium hirsutum
  Clone ID: LIB3197-001-P1-M1-E1
cccacgcgtccgcttccctctcatcctttgaaaatgaagtccttagctatgggaaaaaagctactaacttctgttctcgtaggactagtagttgcttcagctataacccaaaccgtgttggctcaaaactgtggttgtgcgccaaacttgtgttgcagtcaacatggttattgcggtcagggtaacgattactgtggcactggttgcaaagaaggcccttgtttctccaagtctcccactggtgcttcagttgcctccattatttcacctcagttcttcaacgggataatcagccaagctcgtgcagattgtgcaggcaagaaattctatacacgacaagctttcctgactgcacttgattcctttcccgattttggaaaaatgggttctgatgttgaatccaagcgtgagattgctgctttctttgcccatgccacccatgaga

SEQ ID NO: 49272 - DNA, 439 bp, Gossypium hirsutum
  Clone ID: LIB3197-001-P1-M1-E10
gccaattgtttgagctagctagctcttactcaaatggcaaccaaaacgatgatgttgcaaatattttcacttttcttctttttgttcagtatctgcaactccattttccttggtgctaatggagatgacaatggtggttggcaaactgcccatgccaccttctacggtggtgctgatgctaccggcacaatggggggagcttgtggttatggaaacctgtacagtcaagggtatggaacgagcacagcagctttgagcactgcacttttcaacaatggcttgagctgcggtgcctgctacgagctccggtgcaacaatgatcctcaatggtgcattagtcgaaccataaccgtgacagccaccaacttttgtccccctaactatgctttatctagtgacaatggcgggtggtgcaatcccccacgagaacactttgatt

SEQ ID NO: 49273 - DNA, 496 bp, Gossypium hirsutum
  Clone ID: LIB3197-001-P1-M1-E11
aaaccctcaaatatccgatatcgtctttcccaaaaccagatccaaaagccagcagattcatccaccgatggccgacgaagccaaagccaaaggcaacgccgccttttcctctggtgatttcaacgccgcaatcaaacacttcaccgatgctataaacctttcccccaccaaccacgtcctttactctaaccgatccgctgcgtatgcttctctccatcaatacgaggccgcattgtcggacgccaaaaggaccgttgagcttaaacctgactggtctaaaggttacagcaggctaggcgcggctcacctcggtttgcaccaatatcaagatgctgtttcggcgtataagaagggtctggagattgatcctaataatgaagctttgaagtctggattggctgatgctcaatcggcggcgacggcttcggcttcgcgttctagggctgctccgccacctaatccgtttggtgatgcttttcagggaccggagatgtgg

SEQ ID NO: 49274 - DNA, 586 bp, Gossypium hirsutum
  Clone ID: LIB3197-001-P1-M1-E12
aaaacagcgtggagctttacgctgagaaggtcaataacagaggcctgtgtgccattgctcaggctgagtcccttcgctataagctcctcggaggtctcgccgtccgtagggcctgctatggtgtgcttagatttgtcatggagagcggagccaagggttgcgaggttattgttagtggaaagctaagggcacaacgtgccaaatccatgaagttcaaagacggatacatgatttcttctggtcacccagtgaacgagtacattgactctgctgttcgacatgttcttctgagacagggagtactgggcatcaaggtgaagatcatgcttgactgggatccaaagggtaagcaaggcccaacaactccactcccggatcttgtcaccatccaccctcccaaggaggatgaagttatcaaggtggaagcacctgtgccgaccgagattgaacttccgccagtggcttaaagccaatgataactgttatgatagtcatctatttgatatttggagcatgttaagtgtcttaaattttgtagtttttaagtttggcacctaaaatgaaactatgctggatgcttttttct

SEQ ID NO: 49275 - DNA, 458 bp, Gossypium hirsutum
  Clone ID: LIB3197-001-P1-M1-E2
ctcatttcctttttttagccgcaacctatattttctcttcaaagacaccagcccaccgcaaggtacggtgaccggcgctcacaggcttcgaagcatggctcctttcagtcaccgacttccctctgaacttcgatttcgacgaagtgaaagggaatcgacggcctaaactcaaaagaagtgccatttttctttctttttttttttgaatgtaaatgatgaaaaatcggaggaaataaaaaatagagccgaaaatggagatcaccttcttaagaaattacttttttttttcaatctatgtgtattgcgtctgtattgctttctcttggggtgcgtaaccttacaactgatgaaatcccttggctttacagccgaaggggtaaaatgattgaaaaataaatcaaaatacaatattctttggtgtttttttttgattggttgctgcgcgttcgttctttttt

SEQ ID NO: 49276 - DNA, 119 bp, Gossypium hirsutum
  Clone ID: LIB3197-001-P1-M1-E4
ttgggaccaatattttttttttaaaaatccaccaaatttttaattaggatatatggcaggtgattcagggaagaaggaaaagatgtcaaaggggaaaatcatcagcacaagtcatgttg

SEQ ID NO: 49277 - DNA, 468 bp, Gossypium hirsutum
  unsure (1)..(468): unsure at all n locations; Clone ID: LIB3197-001-P1-M1-E6
tcgggaagtgatgatcatcaactccatcatnaccaccaccaccaccaccaccgacaggagcagcaacaccgccccactttcccattccaattacttgagaagaaagaagatgataaccagccttgttcttcctcttcttcccctcctttcccttcccttgtcccaccttcttcctcttcttcatcctctgctgatcaacccaacacgagtcgttccatttcaagcctccaaatctcgccagaaccttttaaaaaaccaccccctaaacgtacttcaaccaaagatcgacataccaaggtcgatggacgtggccgtaggatccgaatgccagctctttgtgcagccagggtttttcaactcactcgtgaattaggccataaatctgatggtgaaaccattgaatggctactccaacaagctgaaccagctgtgatcgccgccactggtactggaacaatcccagcaaac

SEQ ID NO: 49278 - DNA, 386 bp, Gossypium hirsutum
  Clone ID: LIB3197-001-P1-M1-E7
ccaacaccttgactcgagcattgcgagtcgggacggtatggattaactgctacgacatatttgatgctgcagtcccatttggcgggttcaagatgagtggtcaaggaagagagaaagggatttatggcctttcaagttacttgcaagtcaaggcagttgtcactcctttgaagaacccagcatggttgtaatgtttgtttgtttgttttcttacaaattgccatgaatctaaacttgaactaataagctgccagtttttttaaattttgaatgatcagcgtatggtaggatcattcctgaactgataaatttgctcatatttggatgagtatggggcataatgttttaaatatatgaataagaaaaaaggcttaaaataatatttt

SEQ ID NO: 49279 - DNA, 429 bp, Gossypium hirsutum
  Clone ID: LIB3197-001-P1-M1-E8
cacattccatcctttgtttttgttttgttttcttttctcttaaaagaagataaaaaaaataaaaggaaaaagggaaaatttaaaggaaatgaaagattcttgaaggcatggcttcggattcttcgttgattgattaagtttattttattttttaaagttatgatcttttattaaaggagggctttgtttggattcgaaggggcaatcttgataaacagatgggtggtgttactgttgatgtcatgtggtctcttttcttttctgctgtttggcaaaacgaaaggcgagctctctttcttcttttcttcttcttcttcttctttttgctgtttaaatttgggttggactcgattttactgtcatttccagagtttatggattggttttctaggtaaatttagtctcttttggtttttttttaatttttaa

SEQ ID NO: 49280 - DNA, 479 bp, Gossypium hirsutum
  Clone ID: LIB3197-001-P1-M1-E9
gccccccccattttgctcagtcatgcgaccaccgcgccaccacctagtttggtggccggtgatacaccgaaatgagtcgctcggccttgttccaagaggagttcgaaggcctggccttctttgagtcagaaggaaacgaggaaaatggatccccacccctttgtagtcccgacgacagaggggagacctccggcgacgcaacagcgaacgattcaggtggtgtcagatgcgcgtgaggcctgcgattggtggtgtatgctgtggccatttggtgaagagtggcggcagacaaggtaggggttagggttgctgaaacattttgcgtagttgggctattagggttagtttaggtaatgggctaacaggattttggtttgggcttgtttaataattgggttatttgtaaattaactgtttatattttttgaactctttttggtattttgggtctattgacttgggccaaaattgggcatttc

SEQ ID NO: 49281 - DNA, 75 bp, Gossypium hirsutum
  Clone ID: LIB3197-001-P1-M1-F1
tcgtgtattttttattccaatcaaacgcgatgattttattaaaacccgtttgtcttttaaccatgactttaaggg

SEQ ID NO: 49282 - DNA, 420 bp, Gossypium hirsutum
  unsure (1)..(420): unsure at all n locations; Clone ID: LIB3197-001-P1-M1-F10
gtcaggcgggattacccgctgagtttaagcatatcaataagcggaggaaaagaaacttaccaggattcccctagtaacggcgagcgaaccgggaaaagcccagcttgagaatcggtcgccatcggcgtccgaattgtagtctggagaagcgtcctcagcgacggaccgggcccaagtcccctggaaaggggcgccggagagggtgagagccccgtcgtgcccggaccctgtcgcaccaagaggcgctgtctacgagtcgggttgtttgggaatgcagccctaatcgggcggtaaattccgtccaaggctaaatacgggcgagagaccgatagcgaacaagtaccgcgagggaaagatgaaaaggactttgaaaagagagtcaaagagtgcttgaaattgtcnggagggaagcggatgggg

SEQ ID NO: 49283 - DNA, 337 bp, Gossypium hirsutum
  Clone ID: LIB3197-001-P1-M1-F11
gtgacaaatcccgatgtgttgagtgttgttactgagtgggaatcaagaggccttgttgcggaatggaaatcgaattttgggtcttttgattgtttcaccaacaaatttgtcaacactgaacaccaggaaagagaaagcaagaagtatgttggtgtgcctggaatgaattccatttgcaaagcattgtgccacgagcctggagtagacagtaagtttaatatgggcatcgggaagtttgaatggttagaacacgagaatctatggtcattgataggtttggacggacagcatcttggacattttaagggagtggtggcatcagacaaaaacattgctt

SEQ ID NO: 49284 - DNA, 472 bp, Gossypium hirsutum
  Clone ID: LIB3197-001-P1-M1-F12
aagggagggaaaggagcctgcaattcatctttcatggttatatttctggaccaaaaaatgtacatctcgaagaaacgtgtccggagtggctaaagtttgagcaaattttggcccgttatgaacgcacaaaaagccgtgaagggagctgcaacatcatttaacctgatagatatcagtggatcaccatcttttagatggttctcccatgaagttgtgctgaatgcatacaatggaaaccattttttaatgctaatttcactgtaagatttgaagaaaaaggggcgtctttttctgtctttttttaggttctttttaagatatctgtgtaaattgaacaagtgtacggctgtctctgtcatgtactaatagaacaaataactagaaagcgtctggtggcttttcacaataccggatgcaatcaaataaataataataatttgaaaaggtttagattatgctattaatccctgca

SEQ ID NO: 49285 - DNA, 237 bp, Gossypium hirsutum
  Clone ID: LIB3197-001-P1-M1-F2
ctcttatttgttattcttttatcccaatcaatccctattgatattattcaaacccggtgcgtgtctaaacctaagacttcatgccgatcgatcttctctgagtttaatattatctaagacttcttctggaggaaagcacgctattttcttcttaagaactcttcagtgctttattgacacctctgttcctttccttccctcacaagctctcaaaatctcccttccatcattcaattc

SEQ ID NO: 49286 - DNA, 386 bp, Gossypium hirsutum
  Clone ID: LIB3197-001-P1-M1-F4
tttttccaagaaaggctcctcccaaggaacacaaaaggtacaaacctgaagaaagctgtcttacgaggaaaggaaggcgaagttgattgataggttgaaggctttgaattcagctgccggagttgataatgattctgatgaggatgattgatcaagccgctgaagttgatgctacggttgaggaaaacactgggtgaattcagcatcggaatttttgtttttgttctttttttttccttctaaaacttcatccttttgctgctagaatttaagaaaaaaaaaagactgaaggctttgcttctttattaggtatacgaggaactggcatttttgcctgctgcttccgttatttgatagtttaattttataagtactattctattcgt

SEQ ID NO: 49287 - DNA, 428 bp, Gossypium hirsutum
  Clone ID: LIB3197-001-P1-M1-F5
gccgccggcggtcccggccggatttcccggtcgcccaacccttccagtggaggcagccgttcttccttttttttcttaaccaagattggtttcccaaattaagtttgctgtggtggtgaaaatattgggaaggcccggttcaggaggtcaagtgacccaagtgagagtgaagtttttggatgatcagaaccggttcattatggggaacgtgaagggaccggtcgtgaggagatatcctacatgctgagtctgagagagaacaaggagcttcgtgagggtattttatacttttgggttgtgctgttgaatgctccgattctttgattcgttagtagatcgatatggctgcattggagatgtgttctaactgatttatgtattgtgatgaaaaaaaaaaaaaaaaaaaaaaaaaaaggcgcgttaagtca

SEQ ID NO: 49288 - DNA, 437 bp, Gossypium hirsutum
  Clone ID: LIB3197-001-P1-M1-F6
cggacgcgtgggttttttttttttttttttgaattctcaaaacttccaaagcaaccacatcaaaacaaaactacgatgaacaactcataacgttctcagatttttctcaagtcttctaatcctgaatctttctactaataaagacaaacttagtcaaagagactgaatcccatatcatcatcagactcttcttctggttctggttttttctcctccacaggggcagcagcagccggagcagcaccgccagcagcagaaacaggggcagcagcaacggcaaatttgcttggatccgccaaatactctttcactttatcagcctgagggaaagaatactctgttgcaactgcaacagccaagacattcttgtagccattgatgaacatgtgtggtgcagctgcaagggtcgggtatgagatggcaagagacaatgcagt

SEQ ID NO: 49289 - DNA, 409 bp, Gossypium hirsutum
  Clone ID: LIB3197-001-P1-M1-F8
gcaatgatccctacctttacagtaccaacaattttctgggaagacaaacgtgggagttcgatccaagagcaggtacagctgaagaacgagctgaggttgaagaagctcgtcttaacttctacaacaatcggtacaatgttcagcccagttctgatctcctctggcaaatgcagtttctaagagagaagaagacgcaacaaaccattccccaaccaaagatagaggatggtgaagaagtgacatatgaagttactactgcagcagtgaagagagatgtccacttgttttcagcactacaatcaagacatggccattggccagctgaaaattctggccccatgtattatattcctcctttggtcatgtctctctatatcacaggacatctcaatactatattctctagaga

SEQ ID NO: 49290 - DNA, 409 bp, Gossypium hirsutum
  Clone ID: LIB3197-001-P1-M1-F9
ttcccttttttatcttcagagacaaatccctaacacattcccttcccttttttttccccaaatcagaaacccacctcgcccgacccaccattccacctgcggtgaccggtcctccacgactccacctccgctctaacggtgcttccatcgaatctagccttcaacgtcttcaaagaaacaagttttttagtgaggcagaaaaaatagcaagcccaggcaggacttgagttttatgactatggctagttcaaacactcctatacctgtggatgatgggtttaatgagtatgaaagttctctcaaacgtcaaaagtctaccacttcaaaggtgtgggatgaaatgacaaagcttgaatgcgagaacaaaaatgaattgaaggcacaatgtaatcacttgtagactatcttc

SEQ ID NO: 49291 - DNA, 307 bp, Gossypium hirsutum
  unsure (1)..(307): unsure at all n locations; Clone ID: LIB3197-001-P1-M1-G1
taaaaattatttttccctttctctctcaaaatcactccatcacttgacttacanagagaaagttttgagaaacgcaaaagggaagttcatttttttttattttggttttaaaacttgctaaaagaaaagggttaaaaaaaagaagaatttttggcttggttttttctgttctttttctttggatatatgtttttggtggctgccttttttgtgcgtgcttttgaaatggagggagtgggatcaaagggaaggatttgattgaggagatttttgggcggtaatggtgggatttgggagctggggtttt

SEQ ID NO: 49292 - DNA, 443 bp, Gossypium hirsutum
  unsure (1)..(443): unsure at all n locations; Clone ID: LIB3197-001-P1-M1-G10
tgtgtggaaagagttgtanggcttcggtggatgaactatttaagaccggatattaagagaggtaacataacacccgaggaagacgaccttatcatccgattacattcacttctcggcaaccgatggtcactcatcgccggcagacttcccggtcgaaccgataacgagataaaaaactactggaactgccatctcagtaaacggcttttaaaccaaggaaccgaccccaacacccgtaagaaactatcacaacaagccacgaacacgagaaagaacatcagtgacacaagcaaaacattttccgagagacccaaaattcatctcccgaaacccattagggttaccagatcttctttcccaagaaaccaaagcttcgaattggacaaccaccaatgcaatgcgaacacccaagcaggaggaaacccttcgtcggactatgccta

SEQ ID NO: 49293 - DNA, 410 bp, Gossypium hirsutum
  Clone ID: LIB3197-001-P1-M1-G11
ctctaaaacctctttttagtgttattgttttctaagccatttttttataatcaagaactggctaacacaaaggataacattctggaggaaaccaacaagagccaacaagtggttctcgtcctctatgaggccataaacactcgagacgtccaaaccgttcatcaaatccttgcccctgacctagaatggtggttccatggtcctccagcccaccagtttatgatgcgcctcctcaccggagcttcatcggaccaaactttccttttcgacgttgaccctctttcggtcaccacttttgggtccaccgtcatcgttgaaggctgtgatcataaacgttcaatctcttgggttcatgcttggactgtcagtactgatgggataataacacaagtgagagagtatttcaatac

SEQ ID NO: 49294 - DNA, 505 bp, Gossypium hirsutum
  Clone ID: LIB3197-001-P1-M1-G12
aaaacagttacttggatataatttccccttgtcaaaccgaccctctgtaagcaatccgccatggacacattagcagctcgattcaagctcattgttttgccctttctatccatttctttgcttttcttaccttttctccaggccactgatttcgattactgcgataataaaggtaattacgttgtaaaagtcgatggagtcgacatatcacctaatcctgtgattagcgggaaaccggccaccttcacgatctcagcttctactggtcaagctatcactggtggcaaagcggtgattgacgtttacttcttcgggtttcatatccatcaagaaactcatgacctttgtgaggaaacatcttgccctattactgttggcaactttgtgctctctcacaatcaagttttacctggttttactccacctggttcctacaaacttaagatgacattatcaggtgcgggaattaaacagttaacttgcatttccttcgatttcaaaatca

SEQ ID NO: 49295 - DNA, 430 bp, Gossypium hirsutum
  unsure (1)..(430): unsure at all n locations; Clone ID: LIB3197-001-P1-M1-G2
cggacgcgtgggcggngttccccttgatccacgttagaatgtagtcggtgcgggtcagatccgtttttccgccattgttatcgagctttgacaagcttaaacccaagcattccacatctgctatttttcatctcatctcgtccctccttttttttttttttggttcttagccaaatctgttcttaattttgaacgctcaagattaccgtacaaatccatttataaaaagcagtggataacatgtttttgaacgccgggaaaaaagataaagcaatggaagatccaagccaccgaaaagagcggagaatcatcaatacgattcgtcttttataatttcctataaattaatctcatttccccccctaaaattcaatctccattctcatctctggttactttctcaatcatctcagcaaaaagatatggatac

SEQ ID NO: 49296 - DNA, 521 bp, Gossypium hirsutum
  Clone ID: LIB3197-001-P1-M1-G4
ctagccgtctcgcgtgcgccctgtggctctcttcaaccctcgcatatctcttcaagatctgatctgatctgacaaaaaaatgttcgggagagcaccaaagaaaagcgataatactaaatactatgagatattgggagtgcccaaaaccgcttcccaagatgatttgaagaaggcttatagaaaagctgcaattaagaatcatcctgataaaggcggtgatcctgaaaagtttaaagagttggctcaagcttatgaggtgctgagtgacccagagaagcgtgagatatatgatcagtatggcgaggacgcccttaaagaaggaatgggtggaggcggtggtgcccatgatccatttgatatcttccaatccttctttggtggcaatccttttggtggtggtggtagcagccgaggccgaagacaaagaaggggagaggatgtaattcatcccctaaaggtttctttggaagatctctataatgggatttccaaagagctttctctttcacgcaacataattt

SEQ ID NO: 49297 - DNA, 391 bp, Gossypium hirsutum
  unsure (1)..(391): unsure at all n locations; Clone ID: LIB3197-001-P1-M1-G6
cttctttcaacttccaaactccatcatcatttccgtttctctcctctcaaatcccctcgcttctcctgctcagcctctgcttcaagcacaatggctaaacaagttttggtgccgatcgcgaacgggacggagccgatggaggcggtgattacgatcgacgtgattaggagatcgggagctgacgtcacggtggcttccgtcgagaaagagcttcgcgttgacgcttgccacggtgttaaaattgttgctgatgctcttgtcgctgattgtaagaataccgttttcgatcttatcgcgcttcctggaggcatgcctggtgctagcaactttaaagattgtggagctcttgaaagtcttgtgaaaaagcangctgcagatgggcggctttatg

SEQ ID NO: 49298 - DNA, 409 bp, Gossypium hirsutum
  Clone ID: LIB3197-001-P1-M1-G7
agaaaagcacctctgtaaatgtaggaggtggtggtgtaaacgtcaatacaggaaaagggaagcctgggggtgacacccatgtgaacgttggaggcaaaggagttggagtgaacacgggaaagccagggggtggcactcatgtgaatgttggagacccttttaattacctatatgcagccagtgaaactcaaatccatgaagacccgaatgtggctcttttctttctggaaaaggatatgcaccccggggcaacaatgagcctgcatttcactgaaaatacagagaaatcagctttcttaccttatcaaactgcccaaaaaataccgttttcatctgacaagttgccagaaattttcaacaagttttcagtgaaacctggatcactgaaggcagagatgatgaagaacac

SEQ ID NO: 49299 - DNA, 422 bp, Gossypium hirsutum
  unsure (1)..(422): unsure at all n locations; Clone ID: LIB3197-001-P1-M1-G8
cggacgcgtgggtagaaggtgtcttaggagacgccttctttcttcttcttctccctttctttgctttttcgaatttttcttaagcgagaatgagagagtgcatttcgattcacatcggtcaggccggtatccaggtcggaaacgcctgctgggagctttactgcctcgagcatggaatccagcctgatggtcagatgccaagtgacaaaactgtcggaggaggtgatgatgcttttaacacctttttcagtgaaactggtgctgggaagcacgtccctcgtgccgtctttgtggatcttgaacccacttgtattgatgaagtgagaactggtgcttaccgccagctcttncacccagaacaactcatcagcggcaaggaagacgcagctaacaactttgcccgtggtcactacactattggc

SEQ ID NO: 49300 - DNA, 494 bp, Gossypium hirsutum
  Clone ID: LIB3197-001-P1-M1-G9
gtagaatgaaaagagagggtattctggatatagaaatttcatttatctccgccaagttctaacagttctatatttttctacaacttcccttttctttgtatttctatcgacttagccaatgcttgctcactttcactcattcccctaatcactgcaaacaggatctcttcttcttctccgatcaccggtgtctgctcagcgccttattttgatcggataagttagggttccaacgttatatctctgtctgaattgcttttttcctctccttttttaattttattccccaaaaaatggcgtctgaagatgtgaaaagaagcgagtcggcggtctcgacgatcgtgaatcttgcggaagaagcgaagatagctagcgaaggagttaaagcgccgagtcatgcgctgcttagtatttgcaagtctcttgttgctggtggtgtcgcccgtggagtgtcacgtaatgctggtgctcccctagaaagattaaaaatttta

SEQ ID NO: 49301 - DNA, 268 bp, Gossypium hirsutum
  unsure (1)..(268): unsure at all n locations; Clone ID: LIB3197-001-P1-M1-H10
tgnttgattacacgtccaataccaaactttgggatagtatcttacccaaatgttgtcttctacaatattttagattctaatgacaaacactagcctttgtgtttctcattgattttcactgcacatctccaaatcttattcctacattctttttttccacatccaaattccaatatcaatttcgtcatttttaacatattggaaaaagattgaggcatngcctgacgactcaacctgaatttgactatttgattaagttgttactaat

SEQ ID NO: 49302 - DNA, 498 bp, Gossypium hirsutum
  unsure (1)..(498): unsure at all n locations; Clone ID: LIB3197-001-P1-M1-H12
tcgtccacgcgtncgtttcagtttcagtttgagggaaccattttataattcgactgtccagagagttggaaccatgtctttagtaaggtctgcggaaccagctactgcgtcatgtagaaatacgaagctctattcaatacaggatagcagtgacagtactggcatggccattcgaatgtttggttctgataagcataagtctgtttatgttatggattcttacagcagcgagagctacgagaaatacttccttgattctcctacagatgagcttatacattcatctagttctggaatttctggaagttcagttcgcctacaagatgtctcttcttgccagataagagattactcagaaatccaaagcccagatacgctagactctgattcggataagatgaaactgaagcttcaagaactggagagagctctgcttgctgataatgacgttgatggggatgatgacatgtttggcactggtctaagcatggaagtaga

SEQ ID NO: 49303 - DNA, 163 bp, Gossypium hirsutum
  Clone ID: LIB3197-001-P1-M1-H4
gggggtgggggggggaagaatgattggaaaattggcatatgtttgtttcatggtttctggaaaactttcctcgatgaattaattgtatgaaaaaagtgttgaaattatgtagtctaatgtttttatattttaaaagaaagaaatgaagaaaacattgtattgt

SEQ ID NO: 49304 - DNA, 378 bp, Gossypium hirsutum
  Clone ID: LIB3197-001-P1-M1-H5
ttttgaaggagaatccctacctacacttgagtttcatttcctagccttctctttttctaaggtttatatataaacagatgacaaaaccaggtttgggttttgttggtatacatggagcgctaccctcatcagttcatatatgataaagtgttgccttgcctattgcagtttgtggtatagggacaatgaatcttgggtggtggtggaggctttttgcaggtgccttagctggatttctcttctttcatggctttgctgccactgaaacaagctcgaactactcgttcatgtacgatgcaacatcagcttcaacattatcatattacgactacatcattgtcggtggtggcacccgccgatgtccattagctgccacat

SEQ ID NO: 49305 - DNA, 310 bp, Gossypium hirsutum
  Clone ID: LIB3197-001-P1-M1-H6
ggatgattttgaagattgatgatattgttaatgtgaggtagttttctgcattggatgatgaaatgtggtcttgttatccaatttagtgcttttgtttcaaatttctgaattggctatctacttccaaatatttgcttgctttgaagattgatgaagttgctaaatgtcaggtagttttctgcattagacgatgaaatgtgttattgttatctgatttagtgcttttgtttccttatagttttgactatgttttaaacttatgaattggctataatatttgcttgctatcaacaaggatctttttcttaat

SEQ ID NO: 49306 - DNA, 382 bp, Gossypium hirsutum
  Clone ID: LIB3197-001-P1-M1-H8
gttgctctccaaagcgatgatattgagctggttgctgttaacgatcctttcatcaccactgaatacatgacctacatgtttaagtacgacagtgttcacggtcaatggaagcatcatgagcttaaggtgaaggactcaaagacccttctctttggtgaaaagcctgtcacagttttcggtatcagaaaccctgaggaaatcccatgggctgaggctggagctgagtatgttgttgagtctactggtgtttttactgacaaggacaaggctgctgctcacttgaagggtggcgcgaagaaggttatcatttctgctcccagtaaggatgctcccatgtttgttgtgggtgtcaatgagaaggaatataagcctgaccttaaca

SEQ ID NO: 49307 - DNA, 352 bp, Gossypium hirsutum
  Clone ID: LIB3197-001-P1-M1-H9
cccacgcgtccgatttcaagctttgttatagagaccgaccgaaaagaagactaatagaagattttagattcttctttcttacactttactttctgtttcgcattgattttctctggaaatatacaaatcttattcctccattctttttttccagatccaaattccaatatcaatttcgtagtttttaagatattggaaaaagatggaggcatcgtcgacgagtcaacctgagtttgactatttgtttaagttgttactaataggggattcgggtgtggggaagagtactctgctcttgagttttacttccgatacctttgaggaactcaatcctaccatttgtgtggatttt

SEQ ID NO: 49308 - DNA, 193 bp, Gossypium hirsutum
  Clone ID: LIB3197-002-P1-M1-A1
tcgcggacgcgtggggagaaccctcatatggagactactcctcctcttgggacccccatgacatgggtagttcacacatagatattcaacaagagctcaactcttatatggatactcccccttatactgaaaaccctaatgatatgggcaggccacatatagatattcatcaagatctgtttccagattacta

SEQ ID NO: 49309 - DNA, 388 bp, Gossypium hirsutum
  Clone ID: LIB3197-002-P1-M1-A11
aaaaagcaaaaaaaaccctctgaaatttcccagacctctgagctccggccctgggccgatccgcttcgttcatcggacctccgtgttcagccccatgcgcatcaccaactccgccacacacggtggtcgggatccgaaaagcttcgctttttgcgacgaatctaaaggcgaatcgcaaggatttcgttcgagcaccaatgactgcgcgctgatggggccagtgttggattgtagcgcatgacaattctggcgtgattcgggcgccgatggtggcgcgatgcatggtggcgaagtcgaggagtcacagcgcactgatgaaggcgacgattgggccattggacctgaaaagtcgtgacatttggaacctcaaagcatctagaatccccct

SEQ ID NO: 49310 - DNA, 431 bp, Gossypium hirsutum
  Clone ID: LIB3197-002-P1-M1-A2
acgcaaaactctcaagagagatgtaaaagccttaaatgagattaaagcatcacttggatggagagtggtatatgcatggattggagatgatccctgtggagatggtgatttaccaccttggtctggtgtaacatgttctactcaaggagactatagagttgttaccgaattggaagtctatgcagtatcaattgttggtccttttcctattgccgtaactaatttgttggatttaacaaggctggatctccataacaacaagcttacgggcccaattcctccccaaattggacgccttagacgacttagaatgttaaatttgaggtggaataaactccaagatgtccttcctcctgagatcggtgagctgaaaagactaacccatctgtcgttgagctttaacaattttaagggtgagattccaagggagc

SEQ ID NO: 49311 - DNA, 374 bp, Gossypium hirsutum
  Clone ID: LIB3197-002-P1-M1-A4
gaaacctcacccttccaaaaaatggcgttccttaacaagcggtttaaccaccattcccaacttaaccaccaccaccaccggtaaaaaggtttaaggaccatgtccccattcaaccttaaggtttggccacaactggttaataccaatccgcttaattaccaggattcttttaagaatcctccatatatccttcctttcaatgtggggggtttgacccgggtccggttccgtgacagatgggagtgatggggagctgagatcaatgaacaatggggtgagctaaagggagaagtaaggacagatttttgagacattacaatattttgtgctttttagccagcagctgcaggtagttgactgcatacatatatgat

SEQ ID NO: 49312 - DNA, 366 bp, Gossypium hirsutum
  Clone ID: LIB3197-002-P1-M1-A5
gtgtagcgattctcagttagtcttttctttaagcttacagcttctctccagagttttataatgggtaaggagaaggttcacatcaaccttgttgtcattggccatgtcgactctggcaagtcgaccactaccggtcatttgatctacaagcttggtggtattgacaagcgtgtgattgagaggttcgagaaggaggctgctgaaatgaacaaaaggtcattcaagtatgcttgggtgcttgacaagcttaaggctgagcgtgaacgtggtatcaccattgatattgccctgtggaagtttgagaccaccaaatactattgcaccgttattgatgcacctggacaccgtgactttatcaagaacatg

SEQ ID NO: 49313 - DNA, 316 bp, Gossypium hirsutum
  Clone ID: LIB3197-002-P1-M1-A7
acgtggacgcgtggggagaaccctcatatggatactactcctcctcttgataacccccatgacatgggtagttcacacatagatattcaacaagatctcaactctcatatggatactccccctcatactgaaaaccctaatgatatgggcagtccacatatagatattcatcaagatctgtttccagattactatggtggaacagcttctgctccggctccggctattgccctggattctgctccgtctgagccaaaacttgaatttgagggaaatgataaccataatggaaataatgatagtgctcctgtaatta

SEQ ID NO: 49314 - DNA, 413 bp, Gossypium hirsutum
  Clone ID: LIB3197-002-P1-M1-A8
gacaatagagaaaaagtagcgacgaacatggaaagagagcaacaagtttacttggcaaggcttgctgagcaagctgaacgatatgacgaaatggtcgaggccatgaaaaatgttgccaagttggatgttgaactgactgtagaagagaggaatctgttatctgtggggtataagaatgtgattggagcaagaagggcatcgtggcggatactgtcttcgatcgaacaaaaagaggaagcttagggtaatgaacaaaatgtgaagaggataaaggggtatcggcagagggttgaagattagcttgcaaagatcttggatgatatactatccgacattgattagcatcttattccatctttctcgacaggggaatcaactgttttctattacaagatgaaaggagaatttttttg

SEQ ID NO: 49315 - DNA, 271 bp, Gossypium hirsutum
  Clone ID: LIB3197-002-P1-M1-A9
cgtctgttctagacttttaagcaatgtcgagacacatttctatactgcaagccattggtaccaattgacggtacctttatgtttggtaaatatacccattggctattgctagcagtggcacaggatagaagtgggagaattcttccaattgcatttgcaataacatcgggggagtcaactaatgactgagatttctttctatttaggttaaggaggcatgtgtgcccctaacctgatatttgcgttatttcagatcggagcaaccgaatac

SEQ ID NO: 49316 - DNA, 341 bp, Gossypium hirsutum
  Clone ID: LIB3197-002-P1-M1-B1
attgacccttctgcttaataatcgaagaaaatggcgatggtttcgatgaaattttttgtcccttccttaaattctcctaatctacgccccaccaagcgttactcaggcatggctgttgcagcttcaaaccaggatgctgttgctttgggggtcacagtaacacaaggggaaggcaatttacccaagcttctcctcacttctgatcatggcagtgaagctgagatttatctatttggtggttgcattacatcttggaaagttccaagtgggagagaccttctatttgtacggcctgatgctgtatttgacaagaagaagccaatcagtggaggtattccaca

SEQ ID NO: 49317 - DNA, 346 bp, Gossypium hirsutum
  Clone ID: LIB3197-002-P1-M1-B11
cggacgcgtggggtcaaagtgtgggattcaagaaagttggagaaggatatatcatttaggtcgaggctgacttatcacttggaaggaagccgagcactatgcactgcaatgctccgaaactctgcccaagttgttgttggagcttgcgatgggacaatacatatgttttctgttgatcatatttctaaaggtctaggaaatgttgttgaaaagtattcaggtatcgctgatataaaaaagaaggatgtgaaggaaggtgcaatacttacccttttgaactaccccatagataactgtggcattcaaacgtttatgtacagcacccaaaattggggtattcatcttt

SEQ ID NO: 49318 - DNA, 251 bp, Gossypium hirsutum
  unsure (1)..(251): unsure at all n locations; Clone ID: LIB3197-002-P1-M1-B12
cagcgaaagggatagctttgtggagacgcttgaaggttgggctagaacagttgtgacaggaagggcaaagcttggaggaatccctgtaggaatagttgcagttgagacacagacggtgatgcaggttatccctgctgatccaggacaacttgattcccatgagagagttgtccctcaagctggacaggtatggtttccagattctgctacaaagacagctcangcaataatggatttcaatagggaagagc

SEQ ID NO: 49319 - DNA, 371 bp, Gossypium hirsutum
  Clone ID: LIB3197-002-P1-M1-B2
atttcctcgtccatataaaaaccaataaaatagaagagatatatttcacatttatttttctctaacaaaatccaaaaatggcagctccggcagtggagggagtagccgtgacggccctccgatcggtcctactccgagtccgacaggcagctgaacgggcgggtactcaacccgaacgggtccgggttgtggccgtttcgaagactaaacccgtgtcactcatccgccaaatttacgacgccggtcaccgctgtttcggtgaaaattatgtccaagaatttgttcaaaaagcccctcagagcaacaaagttaaaacccttctcggtggagtgccaaatctagcctcttttcagggtgttgataatgagaag

SEQ ID NO: 49320 - DNA, 405 bp, Gossypium hirsutum
  Clone ID: LIB3197-002-P1-M1-B3
tcgtatacattaagctgactttcacatacatttccatcattcttttttcacactttttttatataattttgatagtataatatggagaaatggtatggggtttcagggctggtgttggttttgagtttgttctttggggttaaaggagaaccccaagtcccatgttacttcatttttggagattcattggtagataatgggaacaataatgaacttcgttcattggctagagctgattacttgccttatgggattgactttgctaatggaccgaccggccggttttcgaacggtcgaactacggtggatgtcatagctgaacttttggggtttgacgattacattcctccatactcaactgcaagtggtagacaaatactgggaggagttaactatgcatctgct

SEQ ID NO: 49321 - DNA, 77 bp, Gossypium hirsutum
  Clone ID: LIB3197-002-P1-M1-B4
aattcaatcattaaggtgaggaaaaatgttttgtttggggggaacctgcgtttgcggttccggttgcaggtccggcg

SEQ ID NO: 49322 - DNA, 340 bp, Gossypium hirsutum
  unsure (1)..(340): unsure at all n locations; Clone ID: LIB3197-002-P1-M1-B6
tcgttggtggagtagcanatattcaaatgagaactntgaaagccgaagaggggaaagggtccatgtgaacggcacttgcacatgggttagtcgatcctaagagacgggggaagcccgtccgacagcgcgttcagcgcgagcttcgaaagggaatcgggttaaaattcctgaaccgggacgcggcgggtgacggcaacgttagggagtccggagacgtcggcgggggcctcgggaagagttatcttttctgtttaacggcctgcccaccctggaaacggctcagccggaggtagggttcagcggtcggaaaagcaccgcacgtcgcgtggtgtccggtgcg

SEQ ID NO: 49323 - DNA, 327 bp, Gossypium hirsutum
  Clone ID: LIB3197-002-P1-M1-B7
ccacattcccaaaaataattatcatatcccgatgagaccattcaatgcttccaaagacagaccccagctcacagcatcctctccatcggttatgttcctcccaatccctcagtcaggctccctctctctttgtctggtaaggtccgtagaatccaccgcataatgaggcactagtctttccaggtacaattcttctccacgttttaaactctcttttgcgattaaatgtgtcgtctgattcgctgatctttggatatacttgaatcgtatggtttgagaatttgttgcgaactgcttgatatctctgatgtatgcccccgatttcta

SEQ ID NO: 49324 - DNA, 333 bp, Gossypium hirsutum
  Clone ID: LIB3197-002-P1-M1-B8
gttgccaaggaaatcaaagccatgtctcaggaagatatcttagctcttacgaaagctggagaggtgactattgctacacactgtttgaagctgactgaaattaagcttgtgcgggaatttaaacatcctgatggcatgacagataaagagatggatgcagctggagatggtgatgttttggtggttttggatatacgtcctgatgagtcattgtttgaagctggtgttgcacgtgaggtggttaatagaattcaaaaatcacgaaagaaagctggccttgagccgacagatatggtggaggtctactttgagtcattggatgaagacaagtca

SEQ ID NO: 49325 - DNA, 395 bp, Gossypium hirsutum
  Clone ID: LIB3197-002-P1-M1-B9
cctttctttctctagatctctcgtccttccatctctggttttctttttatcttacattaatataatcaatatctcatagttctttccttgttgttcctcttatttgtgtgtttttgaatgctcatcaacatcttgtccctgatgtttgaggactcatgtctcccgtactcagtgaaatcctcctttctgggtttatgataaactctactctgaggcgcaggacccatcttgttcaatctttctctgttgttttcccttactggttctacgttttttcatgaactctctctctctctctctctccctctctctctctctctctgattggaaccccatagcccgctcttattttcttcagcttttcttcaccatttttcaataataattccatatct

SEQ ID NO: 49326 - DNA, 437 bp, Gossypium hirsutum
  Clone ID: LIB3197-002-P1-M1-C1
ctttgcttgctgtacatatacatatagtattaagtattgaaccctgagggaaagcgttgtcggcgcagggtcactttctgtcggcattgtctgtatccaacgaggggtattcgtttctaagttattcattcaatttttaaattcagaactgaatttgcattccaaagctgtctctgtgttgtgttttttttttctttctcatttggtttcgatgatttggaccttccatctcgtttattaaagaaaaaaaaccaactacaaccattccaccaacttcatcaactattgctcacctcgattcctcatcactgctgtctctttttgtctgccctcaccatcccttctttttttttcaccttgatttcacccattcgcactttatcttattctggatatctctcggtttcttcccccaaaacgagtttcttggttctcgc

SEQ ID NO: 49327 - DNA, 429 bp, Gossypium hirsutum
  Clone ID: LIB3197-002-P1-M1-C10
tctccctctaaaccaaacccaaccaaagcccctctctgcaagcaaaacttaaactaggaattaaacctattctttataaattgctacgaagggttgggttttgttcttaagatcatggatttggagttcctgcaatccatggatgttcagattcttgttggtttaggagtagctgttttagccattcttgttgctgctgcttatctcttttcctccaggaaacccaaaggttgccttgatccggaaaatttcagagagtttaagcttgtcaagcgccagcagctgagtcataatgtggcgaagttcacatttgaacttcctactcctacttcagttttgggtcttcccatcggacagcatataaattgcaggggcaaggatagccaaagtgaggaggtcattaaaccatatacgcctactacattggat

SEQ ID NO: 49328 - DNA, 334 bp, Gossypium hirsutum
  Clone ID: LIB3197-002-P1-M1-C11
cagagaatcagactatcaaattattatcaaaattcataggcatagtttaaactatttcataatcttgagcatagaataaaaccctctttgtttctaaagccttaacaaaagttaaagaaaaaaaaattcagatcaagacagcaatgtgcacgcaaactgcaatggcaattcctttcccctctactcctacagctgcaaagatgaaaaataaaaaataaaaagagaaatggagatcctttgaagagcacttttgcggcgctttatctataccagattgaccttacagctcatcatgtacgtttttttcaacactgtctttgcttgcgtctgattt

SEQ ID NO: 49329 - DNA, 381 bp, Gossypium hirsutum
  Clone ID: LIB3197-002-P1-M1-C12
cgcttcgccattcactccgttcacccttttttttttcattttgcctgatttttcgagttttagatttcttatataatcaactacctaatcctctcgctctctcaaccacaagctaactagcaaacacccacacatactaacatctatggggagttcagggcagcaagtctcctggaaattggcggatcacccaacacttccaaaggggaagacccttgctctcatcgttctcgatggctggggcgagtacaaacccgatgagtacaattgcattcatgttgctcaaactcccaccatggattctctcaaacagggtgcccctgaaaagtggagattaatcagagctcatggtaaggctgtagggctccccacagaggatga

SEQ ID NO: 49330 - DNA, 417 bp, Gossypium hirsutum
  Clone ID: LIB3197-002-P1-M1-C2
gccggaaaaatctctgtcttaacacagagtttggcaagcgagagaaacaaaatccgaagggaatcccaatttcttcgcttttcatcttctctcgcttccatttctccgtttttcccctccggcaatggctatcgattctgattctttcaaacaatcacttctccctagcttcctttactcttctgctcccaactctttctctctggatcgactcctcaacgccaacagccctgctttctctgcttcgcgctccactatacccgatgctcctgcggcctcttcctcgccatcgatcaaggcgagaactttcatgatcccctcccccaatgagcccgggaagaagatcgagatgtattcgcctcagttctacgctgcttgtacctttggcgggatccttagctgtggtctcactcacat

SEQ ID NO: 49331 - DNA, 412 bp, Gossypium hirsutum
  unsure (1)..(412): unsure at all n locations; Clone ID: LIB3197-002-P1-M1-C3
aagcaatcaataacctctgcgtgaaactgtggttgaagtgcccaatatcaagtggggaagatatggaaggtctgggaaatgttaaaagggagcttcaaaagacggttcaatatccagtggggcatcccaggaggttggggaggttgggaatgtcaccgtcgaaagggagtgctattctacgggcccttctggatgtggggaaaacccttcttggccaaagctatcgcaaacgaatgtcaggcaaaacttcattagcgtcaagggtccggaattgctcacaatgtggttcggagaaagtgaggncaatgttcgtgaaattttcgataaggctcgccagtctgctccttgtgtccctttctttgatgaacttgactcaattgctactcagagaggaagcagtgtcggagatgca

SEQ ID NO: 49332 - DNA, 138 bp, Gossypium hirsutum
  Clone ID: LIB3197-002-P1-M1-C4
attcatttttaatattaacatagaaccctaataatgttttccttcatggcattaaatggaaaagcattttgaaatccacctttttttattaaaagcattttgggaaatcttttttggggggggaaatcccaaatatgg

SEQ ID NO: 49333 - DNA, 356 bp, Gossypium hirsutum
  unsure (1)..(356): unsure at all n locations; Clone ID: LIB3197-002-P1-M1-C5
ttccgccgccagttgaatccactgccatcagtccaccgccgcagctgattcttcagttctcttatctccctgctgcctctaataaaaataaaaaagcttgtccattttgaaacagtgttgttatttttaacgattttttgaaaaagcggcaacgagatggatattaatggcaagggtgattccgtggatgagctcaagggcctccgaattactaaccttgacgatgatgacgacgatgacgatgacgaaaacatcgctgntgacgaggatgataatggtgaagacgaagacgatgatgaagaacaggaatctgtaattcttgggtttgtagaaaagcctgaacacaactggtcact

SEQ ID NO: 49334 - DNA, 419 bp, Gossypium hirsutum
  unsure (1)..(419): unsure at all n locations; Clone ID: LIB3197-002-P1-M1-C6
gaactggtaagatccaacaggaaattccaaagtcttcaaattattatgttgctgtggggaatttgaacactaaggaggttgagatacagttgaacttctcagtgaaggctctaagttatgacacaagtcaagcgtattacacatgttctntgggggatcatttgtgtgatttggagctgtatcttctacgtcccaatgttgctgtcttgtcttcacctggtcgtaatgaggtaaaaagaacactcttacaaagtcctcaatattagtgagaattgccattaggtatttaggtcctcacatatgaaattatggcagcttgaactagaaacttgttttcttcaatgtttttcttaagttaataaatattttttttcacgatcaagggaattatntataacaaaacctaatgtcttttgtaa

SEQ ID NO: 49335 - DNA, 410 bp, Gossypium hirsutum
  Clone ID: LIB3197-002-P1-M1-C7
tcgccctaccaaattcacgtcccatctgaggcgccacaccgaagtcaccaactgcatctttgttaggtgacggcgaataaccattagcacaaccagactgccgccacttagccacagaaatggaccttcaaaatcgcagttgtagcaataaaaatagtgttgagctatgtgcccaaaccgaccgcaaatttgacactggattcgagagcgaaacccacgatcgcgcccaccatgtaaacgaccacctcgagctgagtctaccaccaccggtgacggtacagatttcgtaaggttagcctgaattgaaacttcttgaatcatccacgattgtcgatttttatactctagaagcacgttcacaagacattgaagaggcaatggtttagctagaaatgacaccaaaagtacca

SEQ ID NO: 49336 - DNA, 352 bp, Gossypium hirsutum
  Clone ID: LIB3197-002-P1-M1-C8
gcaaagcattagcaaccatagccatggcttcctcaccaaaactcttctctatgtctatcctcttcctttttgccctcttctccatgcaaatccatgctagagagtacttcagcaaattcccaagagttaacaccaatgagaaagagacaacaaccagagagcaagagcacgagaccttcgttccccagaccacccaaaagccagaagagcaagagccaaggttcatccctgaaacccaaaatggttatggcctttacggccacgagtcaggctcaggctcaggctcaggctcaagccggcccagtttcaccaccaaagaaacctatgaaccctatgtcacccctgttagatt

SEQ ID NO: 49337 - DNA, 438 bp, Gossypium hirsutum
  Clone ID: LIB3197-002-P1-M1-C9
cggacgcgtgggctggaacatgataccatttatttctatcggtgcggaggacaaggtcctgaatttcagctcaagaccccacccggacaatttcctgttacctttgccgtagctggcgatttaggtcaaactggctggactaaatcaactttagaccacatcgaccaatgcaaatatgatgtacatctgcttcctggggacctttcttatgctgattgcatgcagcatctctgggacaactttggtgagctggtacagccacttgcgagtgccagaccgtggatggtaacacaaggcaaccatgaaaaggagaagataccattttttacagatgcatttgagtcctataatgcaagatggaaaatgccgtttgaggaaagtgaatcgacctcaaatctttattattctttcgaagttgcaggggtccatgttatcatg

SEQ ID NO: 49338 - DNA, 408 bp, Gossypium hirsutum
  Clone ID: LIB3197-002-P1-M1-D10
caacgaagaaacaaaataaaagaaaaaggaagggaaaacccacatagcccccaaccatcgtcccttttcctctactttcagtactttgttggaaagaggctcatgacttgtcgcctacccttccccgactcgctattactcagttaactcgccctcccttcactcactcccaccatggcattccatttttctgcttaaaagctctttcctttccttttttgtttttttttcctcaaatctcatcttttgaagtaaattatttttatcattattctttagagtaaaagggagagtaaaagggagagatgtatattgtgccgccaccccagcgatcggatccgggttccatcggcggcgggtcgggtgatttacgggtttaccaagcttggaaaggcagcattatatttt

SEQ ID NO: 49339 - DNA, 370 bp, Gossypium hirsutum
  Clone ID: LIB3197-002-P1-M1-D12
tcgagctgttggagggggaagacttggactttgcttatgatagcatttcggccttctcgtcgaggagggacaaccaggaggcggtttttggagctgaagaaggattgaaagatattagggatgcaactgtagcatataaagctgaagctttagagctacagaaacaacttaggcatttgcagtctcagtttgacatgcttacaggtcaggcttcagctttgatccaaggcagacgagcacgggttgcagcaacatctgctgctaatggacaccttacaaccatagatgatagtctctcgggaaggaacttgcagatgaacgaagttcttggaaaaatagcatctacagcacaagagctggcgcattacca

SEQ ID NO: 49340 - DNA, 427 bp, Gossypium hirsutum
  Clone ID: LIB3197-002-P1-M1-D2
tcggtgagtcatagattcttcgatcgtaaaccccaaaatggtgctgattgaaccccactacgttgatgaacaacaagaacaaaaagctacgaatgccactctaacatcatctgaaacgacatccgcttccgccgcctcttcaaatgtgaacggagaagacgccgcctccgatggattcgaaacagcgagcgagcgtgacgtcgatgacgacgaagaggaacaccacgtcaataatcaaaagccatccgaacagaaagcttccgattcttatcaagatgccttaaacgacgagcaatttaaagagaaagctttggcacaagcaaatgatgcgaaaatggaaggaaataaattgtttggaaacggacaattcgaggaggcattgttacagtatgagattgctttgcaaattacagcggagatgcctact

SEQ ID NO: 49341 - DNA, 51 bp, Gossypium hirsutum
  Clone ID: LIB3197-002-P1-M1-D3
aaaaattggacccttaaactatccaccaaaactttttggatggaaggggaa

SEQ ID NO: 49342 - DNA, 392 bp, Gossypium hirsutum
  unsure (1)..(392): unsure at all n locations; Clone ID: LIB3197-002-P1-M1-D4
attttaactctttttcaactgaactctggctaaacggtatcgtttaagtcaggctttcatcaatggcaaaggaaccggttcgggtcctcgtacttggggctgcaggacaaatcgggtatgctcttgtacccatgattgctaggggagtcatgttgggtgctgaccagnccgtgatccctcacatgcttgatatcccacctgctgcggaggctttgaatggtgtcaaaatggagttggtggatgctgcttttcctcttctaaagggtgttgttgctacaactgattgttgtgaggcatgcactggagtcaatgttgctgtcatggttggtggttttccaaggaaggaaggaatggagaggaaagatgttatgtcaaagaatgtgtctatttac

SEQ ID NO: 49343 - DNA, 383 bp, Gossypium hirsutum
  Clone ID: LIB3197-002-P1-M1-D5
cgtctcgaaactattattccttgtggcttggtgcctgggtattggctcggatcacattgcagtaatggaaattcttaaaacaataagagcttccaatggattttctgttgctataattttaaagcctttcacctttgaggggcaaagacgtcttgatgaggtcaaggatttggcaggaaaacttcaagagcttacaaatttttgtattgaaattgacactgactccttgctaaaaaacgaattggtgactctagacgaggctttgaaaactgccaataatgctgttttccttgccataaatgctatatcagttgtcataagtgaggtgcaaataaaacttattgatgcagttcatgataatatgaaagaactaggagtttcag

SEQ ID NO: 49344 - DNA, 319 bp, Gossypium hirsutum
  Clone ID: LIB3197-002-P1-M1-D6
gatttctgcgattgtcctgatggcaccgatgaacctggtacatccgcttgccctactgcaaaattctactgcagaaatgctggacatgtttcactgttcttgttttcttccagagtcaatgatgggatctgcgattgttgtgatgggagtgatgagtatgatggtagagtgaagtgtcccaatacatgttgggaggctggtaaagtggcttgagataggctggtgaaaaaaattaatacttataaggtgggggttacattgagaactaatgaaatcgaacaggctaagatagtatttgcttaagatgaagcagttctta

SEQ ID NO: 49345 - DNA, 419 bp, Gossypium hirsutum
  Clone ID: LIB3197-002-P1-M1-D7
aaaaaaaaaaggctttcttccaaaatcaaacgatttcgatctctgatctgggatttgttaccatgagcgacggagaagacgctgtacggcgccataatgcgattgcggagtaccgaaagaaactccttcaacacaaggagtacgagtccagggttcgggcaggtagggagaatctgagagctgctaagaaggagtttaacaaaacagaagacgatttgaagtctcttcagagtgttggacagatcattggagaagttctcaggcctcttgacaatgaacgcctgattgttaaagcaagcagtggccctcgctatgtggttggttgccgcagcaaagttgacaaggagaaactgacttctggaactagagtggtccttgacatgacaacacttacaattatgcgggctctttcacgtgaa

SEQ ID NO: 49346 - DNA, 316 bp, Gossypium hirsutum
  Clone ID: LIB3197-002-P1-M1-D8
ctcaactaaacttataacgttcgatcgtttaacgcaaacccatttttaagtgagggaaaggtttcagttcagagtcataagcaacatcaatggctccttcaactctgacggctcttgcggaagagaaaaccttgcaggcaagcttcgttcgtgatgaagatgagcgtcctaaggttgcttacaaccaattcagtaatgatatccctgtcatctctcttgctggtatcgatgatgttgatggcaagaggggtgagatatgcaagaagattgttgaggcttgtgaggattgtggggtctttcaggttgtggatcatgg

SEQ ID NO: 49347 - DNA, 326 bp, Gossypium hirsutum
  Clone ID: LIB3197-002-P1-M1-D9
tcgagatagataaaaagtaaagggcgagagaaactgctgcgcctaactcttcttcttatcattagaaagtgacgaccctttttgttttcgattataattttgataaaattaggtttttggtgagcaacaataagaaacaatgaatgaaaaactgatcggttagggctttcgaattgtgatgaattagggtcttggaacggattaattggctatggttctgttattgaaacattagtttttttattcaaccaggttaagattaaggtttatttaaggtggatacaccgtttggccttgaagtagataaaggttgtcttgggtgagtt

SEQ ID NO: 49348 - DNA, 324 bp, Gossypium hirsutum
  Clone ID: LIB3197-002-P1-M1-E10
gaggcattaagggcacagatggaagtacagagtaaattacatttgcaacttgaggctgaaaagcacttgcagattcgccaggatgcagaacgaaaatatatggccatgcttgagagagcttgtaagatgcttgccgatcattttattggaagtggtgcagttaccgaaacagataacctggaatttggttgtaagatgctgagaaattattctgttgatccactgggattttactcctcccaatccgctgaggtggagaatgcatgcgaccaggaagaagaaatgccatccggtctgcattcacagaggggcgatggttctact

SEQ ID NO: 49349 - DNA, 386 bp, Gossypium hirsutum
  Clone ID: LIB3197-002-P1-M1-E11
cccacgcgtccggttaagtttttgaggcttgcaaataggctcgggcagactccccataatgttgttgtggcacaggttttgtacagactaggattagctgagcagctccgggggagaaatgggggccgggttggtgccttcagctttgaccgtgcaagtgctatggctgaacagcttgaggcagctggaaatgaaccccttgatttctcctgtacaattatggtccttgggaagaccggagttggtaaaagtgctactattaattcaatatttgatgaagtcaagtttggcaccgatgctttccagactggtaccaaaaaggttcaggatgttgtgggtactgtgcatggtattaaagttcgtgtaattgacacaccaggccttct

SEQ ID NO: 49350 - DNA, 332 bp, Gossypium hirsutum
  Clone ID: LIB3197-002-P1-M1-E12
cccacgcgtccgcatggcttctctgcctttcatcttcttcttatctttctttataatctccacaacattgacgtcagccggcgccgccgccgccaccatcaaactctccctctctcccttccctcacccttcttcctcccatccttaccaaattctcaacaacttagtcacttcttctgttgcaagagcccaccacctcaaacatcccaaagccaaggccgataatactacctcttctcttctcagggctcccctattttctcacagttatgggggctacactatctccctcaaatttggaactccgcctcaaacccttcctttcgtcatgg

SEQ ID NO: 49351 - DNA, 358 bp, Gossypium hirsutum
  Clone ID: LIB3197-002-P1-M1-E2
ggcagaaatgtcaactctttgtacatttcttttctcacttctactctttgcctcacatccccttatcctccccactgctgccgacggccggtggcagctgctacaaaaaagcattggcatctcatccatgcacatgcaactccttaaaaatgaccgtgttgttatgtatgataggactgatttcggcccatccactctgccattggcaagtgggaaatgccacaatgacccaaccaacactgctgtccaagtagattgtacggcgcattcagttgagtatgatgttttgagcaacaagttcagggctcttactgtccaaagcaacgtttggtgttcttcaggcgccgtcatgcctgac

SEQ ID NO: 49352 - DNA, 168 bp, Gossypium hirsutum
  Clone ID: LIB3197-002-P1-M1-E3
agttactggggacctaattagcctttcagaacaagaacttgtagattgtgataccagcaactatgggtgtgaaggaggatacatggactatgctttcgagtgggttataaacaatggcgggatcgatagcgaaaccgactacccctacactggtgtggattgcacatg

SEQ ID NO: 49353 - DNA, 407 bp, Gossypium hirsutum
  unsure (1)..(407): unsure at all n locations; Clone ID: LIB3197-002-P1-M1-E4
tcgtgcaaatccaagcacaatcaagacaaaagaagaagaacaaagcaccagtggagtactgagctcagctaattaatggagttctgaaatcaccaatctcctcgtcctcctcctctttccgaaaaataaagatatcatcagacagactatttgctcgaatcccatccgtgagaatcttgttttgtttagttatgcatactttgatgggctgcttttgcttgaagaaactaggacacaagcctgggtatgaagcgcctatcaatcttgcttccgaaacaccttttacggtgaacgaagtagaagctttatatgatctgttcaagaagttaagcagctccataattgacgatggtctgattcacaaggaagaatttcagcttgcactctntaaaaacagcaataagcat

SEQ ID NO: 49354 - DNA, 235 bp, Gossypium hirsutum
  Clone ID: LIB3197-002-P1-M1-E5
tcggtgtgaaggctccacgtaagcagctaggcactaaagctgctcggaagtgagcaccgtccaccggaggagtgaagaagcctcaccgtttcagaccaggaactgtggctcttagggaaatcaggaagtaccagaagagcaccgagctcttgatccgaaagcttccattccagaggcttgtgagagaaatcgttcaagattttaagactgatttgagatttcaaagcagtgccgt

SEQ ID NO: 49355 - DNA, 398 bp, Gossypium hirsutum
  Clone ID: LIB3197-002-P1-M1-E6
ctgagtttaagcatatcaataagcggaggaaaagaaacttaccaggattcccctagtaacggcgagcgaaccgggaaaagcccagcttgagaatcggtcgccatcggcgtccgaattgtagtctggagaagcgtcctcagcgacggaccgggcccaagtcccctggaaaggggcgccggagagggtgagagccccgtcgtgcccggaccctgtcgcaccaagaggcgctgtctacgagtcgggttgtttgggaatgcagccctaatcgggcggtaaattccgtccaaggctaaatacgggcgagagaccgatagcgaacaagtaccgcgagggaaagatgaaaaggactttgaaaagagagtcaaagagtgcttgaaattgtctggagggaagcggat

SEQ ID NO: 49356 - DNA, 295 bp, Gossypium hirsutum
  Clone ID: LIB3197-002-P1-M1-E7
cttcaaggaagtccttcccgagagtgaccaatgaggctgttcaaaaggctgctgctgctttgaagggctctgaccaccggcgtgctacaaatgttactgctagactcgatgcccagcagaaaaagcttaacctgccagtgctacccaccacaaccattggatccttccctgaaactttggagctcaggagagttcgtcgtgaattcaaggctaacaagatctcagaggttgattatggtaaagccattaaagagggaattaataaagttgctgacctttaagaagagcgttacat

SEQ ID NO: 49357 - DNA, 287 bp, Gossypium hirsutum
  Clone ID: LIB3197-002-P1-M1-E8
ccatgaaaatgttcctttcctgtctgttaccatttaatgacaaagtacaacagttgatcctttttctcttagaataaaacaagcaattaataaaagtcccatcaaaaatttttcaaccgcttaaaattttgttattactggaaaaaaaggtccttttttttgaactattttctggccaactaacaacaatggggcattgcctggacattcctggctattttggagatgctggtagtagagaggtccttcacaaagttggtgctgaaagagcttgtactgacaaaata

SEQ ID NO: 49358 - DNA, 324 bp, Gossypium hirsutum
  Clone ID: LIB3197-002-P1-M1-E9
gaagcataaggtatcgatctgagtgtgccaaagagggaaaagtatgggactgctttctaacagaatcgataagaagagcctgaatccaggggatcacgtttattcatggaggactgcttatatttatgcccatcacggcatctatgttggaaacaataccgtcatccattttacaagacgtggccaacaagttggtacaggaactgtgcttgatcttatcctggtaagctctggaccagctcaatctcaactgcattgccctacctgcactacacctgaagaaaggaatggagttgcttcctcgagctaggactgcttacttgc

SEQ ID NO: 49359 - DNA, 271 bp, Gossypium hirsutum
  Clone ID: LIB3197-002-P1-M1-F10
tcgctgagccaaatggttccatcagagagcacatagacagtggtcgtgtggaaggtcctacttcatctgctgggcatccaaaagaggttcaagtagaaaagagggaaaagcaaagtgttgaatatggaatgtcaccaactcttagagagatagctagagagtctctagaggatcattctagattaacaggtggcattttgggtcctactgcagcaagcagaaaggataaaaagggaccaaaaggccacaaagcttcagaaattgccaaaac

SEQ ID NO: 49360 - DNA, 311 bp, Gossypium hirsutum
  Clone ID: LIB3197-002-P1-M1-F11
ccgaaggagaaactctttcccaaagcatttttgaactttctttcatggcggatatacttgcttctttgaggtctttaatggcctctcaatctcctcctctcgatgccttacttgtcgcttctgaagattatcatcagagcgaatatgtttctgctcgtgacaaaaggcgcgagtttgtttctggattcaccggaagtgcaagattggcacttataacaaaaaatgaagcaaggctatggaccgacggccgatatttcttgcaagcaacgcagcagcttagtgatcagcggaaactaatgcgtatcggagaa

SEQ ID NO: 49361 - DNA, 226 bp, Gossypium hirsutum
  Clone ID: LIB3197-002-P1-M1-F12
cgctcttgtaattttgcttagggttttcttttaatcaaaactaatctgattctgctttctactccaaaatcaccaaaagcccagatttcgtttagaaattagaaaaccccaccgtttatagcgctggtattaaatacctccataaacatcatcccctcaaaaaaggcgaagctgctctctgccattaaccgctactacacaagaaataaaattacctcaaaacaat

SEQ ID NO: 49362 - DNA, 309 bp, Gossypium hirsutum
  Clone ID: LIB3197-002-P1-M1-F2
aagttatttcccattttttggtctttctttatgccaactgataatcaaatgaaagacatgaaaccgaattccataatgggatcgtcagtcaccgacggcgagatcgtgtgcgtaacaggcggctctgggttcattggttcatggctcatcaagctgctcttggaacgcggttatgtcgtccgagccactgtgcgcgaccctggcaactcgaagaaggtgaagcatttactagagctacctaaagcagagacgcactttgactctttggaaagcagatatagctgaagagggaagctttgatgatgcaat

SEQ ID NO: 49363 - DNA, 203 bp, Gossypium hirsutum
  unsure (1)..(203): unsure at all n locations; Clone ID: LIB3197-002-P1-M1-F3
tcgctttttagagttgtcaagccttttttctttaactgcaatgtaacaagcttttcttttcttaaaggtacttgaaaaaggtgaagatttttctgttctttttttctgaggggtgggggagggggcttttgtgtagtttagactttagaatttntgggttttngagtagtttgattggatgagagtggaggaaaattggagtg

SEQ ID NO: 49364 - DNA, 181 bp, Gossypium hirsutum
  Clone ID: LIB3197-002-P1-M1-F5
ctgagccaaatggttacatcagcgagcacatcgacagtggtcgtgtggaaggtcctacttcatctgctgggcatccaaaagaggctcaagctcaaaagatggaaaagcaacgtgctgaatatggaatgtgaccaactcttcgagagatagctagcgcgtctctagaggagcatgctagatt

SEQ ID NO: 49365 - DNA, 300 bp, Gossypium hirsutum
  Clone ID: LIB3197-002-P1-M1-F6
cgtttgagattatcaaaacgaagccttcttcgaatttcctcattcaagaagcaggagttttgctaagaccctcaccggaaagaccatcacattggaggtggagagttctgatactactgacaatgtataggccatgtcataagacacggtatgcatctcctcagacacagcaaagcgtgagcttctctgtgtagcaacttgaggatcgccgtacgtacttttgacacaacatgcagaaggggtacacactgtacttagtgctttgtctccagcgacgaatgcacattattgttaagacta

SEQ ID NO: 49366 - DNA, 427 bp, Gossypium hirsutum
  unsure (1)..(427): unsure at all n locations; Clone ID: LIB3197-002-P1-M1-F8
tcgcccacgcgtccggccgtatacgtgaatagtaccgtaaacggtcgtattccccaagtacgaacctggctctggtaccaattgttgcgcggaagcgtgtgaaagagtaaaattattgtactgaaaaatcacactaagttcaattcccaggaaagggaggtggatcacgaggatcgcttacataccagatctttcctagccagaatatccctctatcgtaatttaatagcacaataaatcactacaatgacacttgcaaaatatgcagaacaaaaataaagaacacttgaattttaacgaggttcagcaaattttgcctacgtncttaggcactaccaaatatatttcactccaaaaatacaagtgaaagtttacaaatagggagagagaacaattgccttaagtagagaatggcaagtgtgggatg

SEQ ID NO: 49367 - DNA, 414 bp, Gossypium hirsutum
  Clone ID: LIB3197-002-P1-M1-F9
cccacgcgtccggctgtctttcacaaagctatttagccggcttttcgccaagaaggagatgcgtatcctcatggttgggcttgatgctgctggtaaaactaccattctttacaagcttaagttgggagagattgtcactaccattcccaccatcggtttcaatgttgagaccgttgaatacaagaacatcagctttactgtttgggatgttggtggccaggacaagatccgaccattgtggagacactacttccaaaacacccaaagacttatttttgtggttgatagcaacgatcgtgatcgtgtggttgaagctagagatgagttgcacaggatgttgaatgaggatgagctgagggatgctgtgctgctagtaatcgcaaacaagcaagaatcttcaaatgctatgaatgc

SEQ ID NO: 49368 - DNA, 224 bp, Gossypium hirsutum
  Clone ID: LIB3197-002-P1-M1-G11
tcgcggacgcgtgggttcaaagaaaaaaaaagagctttatttttttttcctcttctatttttttggtgggttttttttttgtttggcttcgatcaaaccctaggttcctgccgattatacgcatgtggacgggcctaggctatgcgggtttccgcatctaaattatggatttagaagattcataccttgctcaagagattgcaattgccctttaaacaagatac

SEQ ID NO: 49369 - DNA, 331 bp, Gossypium hirsutum
  Clone ID: LIB3197-002-P1-M1-G6
tttattttacttgggatcaggagattccaaagcgtggtaaaataatctttctttgttgatttggtctgggacataatcctgtagttgtagagtcttagtcattagccatttaaagccactttgaactgtgtactcgcctgatttgtccccttaccatattataacatccggttgagtcctgcttaccaatgggatagacaagattacctcagcttgatccctatccagggtgggtagctaagaatcattccagatgtttcttgaattcaccgtctctatcctacagtctgttttttcttctaataagctttcgtgcgttttaaatgctgct

SEQ ID NO: 49370 - DNA, 330 bp, Gossypium hirsutum
  Clone ID: LIB3197-002-P1-M1-G7
aagaaattgctctctcattgcactcttttgatcgtcgtcgtcgttattatgagttaaaatcgtttttttttaaaaccatacgaatttgccttgatttatgccctgcaattgactcttttttttttttctctcttgttgtttgttttttgattgtttcgatcaaaagtaagatacggttttactaactttccgtgccgcatccaccgatgccagataatcggcaaattcagaacaatgttgtttcgaatcaatccgctgatagcattgaagaagcaatttttgcgtttgaaaataaatgataataatcaagaggtgggtgtttctaaatca

SEQ ID NO: 49371 - DNA, 322 bp, Gossypium hirsutum
  Clone ID: LIB3197-002-P1-M1-G8
gcataatttgcattcaaaattccttgttcttaatacaaagggggggaaaacccataaactgaatcataattttctttctttcatatttgttaacaatttctctgcaattctacaaaaaaaaaagcttcctgcaaatgaggccttcctgtttagaagcagtctgttttctggtgttgttcattttcctttatagtgttgaagggattcgattggagggaagttttaaatcatcaggacatgatgttaaattgcatgaagaagctttgatgaaaataagtaatggagttatgggagatgtcattttctgcaaacaagggcaatg

SEQ ID NO: 49372 - DNA, 97 bp, Gossypium hirsutum
  Clone ID: LIB3197-002-P1-M1-G9
ttctattaattaaaattccaatatcactgcgcgtgaacttcacagatgtggggggtctcttaaacacatacatatctattttattcatctcatatat

SEQ ID NO: 49373 - DNA, 228 bp, Gossypium hirsutum
  Clone ID: LIB3197-002-P1-M1-H10
acgatatgacggacctacagagaattcagaggatttatcgaaacagattggacattctctcagcagattgacttgattttaattttaacaagatttagacgcgagagaggtgcatgtggttaatacacaagataaagctaaatgcgtcacgcttgaagaatgtaagctggttgagaagcatatggcgaactatataatgaaactggctaaaaaaggtcaagagaggca

SEQ ID NO: 49374 - DNA, 244 bp, Gossypium hirsutum
  Clone ID: LIB3197-002-P1-M1-H11
tgaataaaatcattatgagcacctaacactgacaggatttaccaaaacagccgagaatggcggccaatttctggacttctgctcactttaaacagcttttggaccccgaagaggtggatgtggttcatcaacaagataaaggtaaaggcatcacgcttgaagaatttaagctggttaagatgcatatggcgaactatataatgcaactgggtcaaaatgtttaagtgaggcaaagggttgttgc

SEQ ID NO: 49375 - DNA, 67 bp, Gossypium hirsutum
  Clone ID: LIB3197-002-P1-M1-H12
ctacgcgttactttaatgcgagcacgtattatatggaaggaaataccctacatgcggtatgtgggac

SEQ ID NO: 49376 - DNA, 352 bp, Gossypium hirsutum
  Clone ID: LIB3197-002-P1-M1-H2
tgtttcatggatgcttaacaaccggaggtgtgagtaataatatgttgatgaggcttgttacacatccggaaatacagcataagatatactcagagataatcatggcaaagaaaggtttggaggacaaagctcaacctgttgtagagaagatgcctttattgttggcaactatctatgagtctgctcgtgttatgccagccggacctttgctacagaggtgttctctgaaacacgatttgaggcttaagtctggtgtaattgtgccggctggagcaatacttgtcgtacctatgcagttggtgcagaccgatgattctagttggggaaatgatgctggcaaatttaatccata

SEQ ID NO: 49377 - DNA, 197 bp, Gossypium hirsutum
  Clone ID: LIB3197-002-P1-M1-H4
acgcgtgcgaattaaatcgagcgcacaagagaatgggaagtgatatgtgcggaacacggcatatattcaacggagcgtgacaatggagataatgttctacgactcaagaggatgagatgtttactacaatgaatacagttgaggtagggtcgttcctcgtgctgttcttatggatcgtgagccagggaccattgata

SEQ ID NO: 49378 - DNA, 262 bp, Gossypium hirsutum
  Clone ID: LIB3197-002-P1-M1-H5
tcgaaaaaaaatcattatgagcacctaacactaacaggattcaccaaaacagcaaagaatggcggccaatttctggacttcttctcactttaaacagcttttggacccggaagaggtggatgtggttcatcaacaagataaagataaaggcatcacgcttgaagaatttaagctgattaagatgcatatggcgaactatataatgaaactggctcaaaatgtaaagtgaggcaaagggttgtagcaactgcaggtacatata

SEQ ID NO: 49379 - DNA, 328 bp, Gossypium hirsutum
  Clone ID: LIB3197-002-P1-M1-H6
gcgcatttgcccaatctccaaacccccaaaagtccatcgccaccaggaggaaaaaagcaaaagaaccctaccgacgatgttccggcaagcgtcacgcctgttggctcgaactaccaccccatggaggggaagtcgagcattttcgtcagatgtaccagccacacccgctcaagattcgagcttcatcgaatcatggtccaaagtcatacccaacttagacccttccaagacaccatcttctttcatgaccccttgccccgccaccccttctgctatcccttctaaactcaccgttaaccttggtcgtccttatgcatctgagctcttc

SEQ ID NO: 49380 - DNA, 335 bp, Gossypium hirsutum
  Clone ID: LIB3197-002-P1-M1-H7
agctagctagctcttactcaaatggcaaccaaaacgatgatgttgcaaatatttccacttttcttctttttgttcagtgtctgcaactccattttccttggtgctaatggagatgacaatggtggttggcaaactgcccatgccaccttctacggtggtgctgatgctaccggcacaatggggggagcttgtggttatggaaacctgtacagtcaagggtatggaacgagcacagcagctttgagcactgcacttttcaacaatggcttgagctgcggtgcctgctacgagctccggtgcaacaatgatcctcaatggtgcattaggtcgaccat

SEQ ID NO: 49381 - DNA, 111 bp, Gossypium hirsutum
  unsure (1)..(111): unsure at all n locations; Clone ID: LIB3197-002-P1-M1-H8
ctatagggggaaaggctggggtacgcctggcaggtactcggtcttcggaattctctcgggttgacctcacgtcgtcttcggtcgnnaaatccgcttaagggagggtgtgta

SEQ ID NO: 49382 - DNA, 331 bp, Gossypium hirsutum
  Clone ID: LIB3197-002-P1-M1-H9
tcgtttgttttgaaggtgaccaacaacagcacaccacacagcagcgcatttagtcttgttcttgttcttcttctagttgtttccaatggaaaagctggaacacctcaaatctgccgtcgctgctctttctgaaatcagtgaaaatgagaaaaacggattcatcaaccttgtctcccgctatctcagtggagaagctcagcacatagagtggagtaagatccagactccaactgatgaagtggttgttccttatgacaccttgtctccctctcctgatgatcctgctgaaaccaaaaagctcttggacaaacttgttgtcttaaagcttaat

SEQ ID NO: 49383 - DNA, 156 bp, Gossypium hirsutum
  Clone ID: LIB3197-003-P1-M1-A1
atagccatggcttcctcaccaaaactcttctctatgtctatcctcttcctttttgcgctcttgtccatgcaaatccatgctagagagtacttcagcaaattcccaagagttaacatcaatgagaaagagacaacaaccagagagcaaaagcacgag

SEQ ID NO: 49384 - DNA, 393 bp, Gossypium hirsutum
  Clone ID: LIB3197-003-P1-M1-A2
gaaggtttagttttacaaacatggctagttccggtgtccttaagttggtttccatgattctcatggtgtgcatgacgatgatgagtgcacccaaggcagccaaagccgccatcacgtgcagcgacgtggtgaaccacttgatcccgtgcttgtcctacgtacaaaacggcggtacacccgctgctgcatgctgcagtggggtaaaagcactctacggcgaggttcagacctccccggaccgccaaaacgtgtgcaagtgcatcaaatcggcggtgaacggaattccgtacaccagcaataacctcaatctcgcagccggcctacctgctaaatgtggtctccaactcccttacagcatcagccccttcactgactgcaacaaggtgcaatgag

SEQ ID NO: 49385 - DNA, 368 bp, Gossypium hirsutum
  unsure (1)..(368): unsure at all n locations; Clone ID: LIB3197-003-P1-M1-A3
cttgatcataagtgtcaagctgaagaatctcttagtagggacgtagtactttttgggttcaatagaagataaagtccattccaagcgcatgccatcaaaatcatccttgatcctgcaatcaacagggatgctacgttttggtggtgtggtgggatcactggactcatcgaaacctacgagaaggctatcgctggagggtccaattatggtgggcaagtagatctccgcagctcgaaacaattggttatcgccagcgtgccatcggttttcgattatgaaggtaaagtcngatgagaagtaagcagaagtaaagtcgtaaatcatagagaagatgtagtttgtcatcctttcanggagcatttcattta

SEQ ID NO: 49386 - DNA, 455 bp, Gossypium hirsutum
  unsure (1)..(455): unsure at all n locations; Clone ID: LIB3197-003-P1-M1-A7
cgnttccgattcgatanttgtgttccgcttcttaaattacagccagagtataccttaggannaagtgagtgaacgtgtgaggcgtttcaaanngaattcnnaaaaacacttttggagaaagaatcnnaacaagcgctgcgtgtgcatcnnaccattgagaagcgnnncagatggagaaatatcanntagattggtgnnntcataaaagaaaaaacagcncagctttttggatcaaccctttcttctgagnnaaaacataagaattcagagaaagttgcaccggagaatgcnncaaaagtgaaaacgttgaaaagaagatgaaaggaagtggagaactcaaagaggaaaagaagggagaggatttatatatggcaaatgtggcataggaaatgggacaagatgccccaaaggaactgttccaatacggcggagcacaactcgtgatgttttgagag

SEQ ID NO: 49387 - DNA, 344 bp, Gossypium hirsutum
  Clone ID: LIB3197-003-P1-M1-A8
cccacgcgtccggctcgatgtcctggaataggagaacggaaggtaaaacgtttgcgcgatacttttcatgaacccttcaagcgcatagtttccagtaacccttctgttccggaaactcctgtatgcaaagatgctgaaccaagctcagcaagtgaaatcatagaagcagacaaggatactgaagatacgagcaaacgtaggaagaaagaaaatgaaattaacattaaatcggctctaactgctgcatttgccaagtatgctggtaaaaatagtaaaatgaacaataaatccgagggtaataagggaggaggaacccttgctgctgcagtaccagaaccagcaac

SEQ ID NO: 49388 - DNA, 403 bp, Gossypium hirsutum
  Clone ID: LIB3197-003-P1-M1-B1
aatggaattagcaatagctcagttttggtcaagtggcatgggaagtcacgagacgacaattgtagattttgagatcgtctttcatggaattggagtcaacagaactgaagtagtccttgatggaagtgaagcacccatcagaattgaggctgaagcactattggcctctgaaagacttgcccctactgctactttaaacaagataagagttccatatcgacctactgaggcaaaactttgtactcttccaactaatcgtgacaaattaccatcagggaaacagatactggcattgacactaacttaccactttaaattggaagatggagcagaagtgaaaccgcatattccattgctcaataatcgtatatatgacacaaaatttgagtcccaattttacatg

SEQ ID NO: 49389 - DNA, 388 bp, Gossypium hirsutum
  unsure (1)..(388): unsure at all n locations; Clone ID: LIB3197-003-P1-M1-B2
cggacgcgtgggctggaattacattacaaaaggtttttatctttttcttgcgttttcttttttgtccttattatgtttatatagtggagggttttagaggctagaacactgtaataccatatagtatatacaaaatatgaaacagaccatgccattatttattgaacaggtaaaaaaccaattattttttccctttttcttaaataaaagaccatgccattaangtanatgccattaaatatatttgttggtgagataggcttgcctcaataaaagtattgttttattcgattacttttatttacctcatgcttttcatcaacagtctaggacataatatgccttaccactgatttcctcaccaatttatctttaagtagctcatcat

SEQ ID NO: 49390 - DNA, 408 bp, Gossypium hirsutum
  Clone ID: LIB3197-003-P1-M1-B3
ataactagctttctactagttgtatattagcaaatcagtcgatgtggagatccttcaagtgatggcattgtagatacatggagaaaaatacattggaggaaacagttgaagcttgcttggagagagaatttgtgtaggacttgattgttagttttataggatatatatatatagttttcatgtggatgggggagggaagattttctttgatgtagtgttttcccactattgatatatgcctagtcttgtgctatattgcttttctacgtttctcatttttaggaaggcacctgaacgcccatcctcgacctgagaggttgctgctgtctttctttttgtacacagctcgtgtaatttcagcacatatgaagattttggacttgatatatatcgggtatagttggttgc

SEQ ID NO: 49391 - DNA, 361 bp, Gossypium hirsutum
  Clone ID: LIB3197-003-P1-M1-B9
tcttactcgtccgctccctctcttcttagggctgctgtatcttagttcttgggtgattagccaatcacagcagccatgtctctcctcaatgatctcatcaacctcaacctcagcgacaccactgaaaagatcatagccgaatacatatggatcggtggatctggtatggatctgagaagcaaagcaaggactttgcctggaccagtgacggacccttcaaaactcccgaagtggaactacgatggttccagtaccaatcaagcacctggagatgacagtgaggtcattctttatccttaagctatattcaaggatccatttaaaaaatgaaacaacatcttggttatgtgcgattcttaca

SEQ ID NO: 49392 - DNA, 391 bp, Gossypium hirsutum
  Clone ID: LIB3197-003-P1-M1-C1
tagttatcagctttgtcccccttttttttctcaggaaaatgggtaattgattattcattcggttgaatgctggtgaggaaatgggatttttggtgaagttggattaatgaaatatgagatttagatttagtttgagcttttaagctttttgtgtatggtgggattggatgagtataaaaatattggaaaagtaaaaatttcttgaacgaatgaaggggtagtgattgattgtaagaacagaagaaggttttatcgaggtgtggattatcatgggttgcatttgttgtaagccatctgctattgaagatagtaagcagagtcctacgagtaaggtctcattagatgttagggtatcaatggcaacttcttcaggagggaggattcacagaga

SEQ ID NO: 49393 - DNA, 140 bp, Gossypium hirsutum
  Clone ID: LIB3197-003-P1-M1-C2
ctccaacaaataattgtcttcatgcaagtggctgcttctttctcacttggtttgatttattatgtagtgtttcataactggcggcttcactcactgggtcttgtatgtgttttcaatggtatatttgggcatgttttagt

SEQ ID NO: 49394 - DNA, 394 bp, Gossypium hirsutum
  Clone ID: LIB3197-003-P1-M1-C3
ggcaagccttggttaatttatatcaagttgtggatgaagatgagaggtatgctaaactcgtagtggaagttggtggcattgtgaatgtgttagtaggctttcttgattcacctgagatggagattcaagaagaggcttcaaagattgtatctttactatcagggttcgatttgtacaagggggttttggttggagctgggattattgggcctttggttcgggttctggaaaatggcagtgagttgggtaaagaaggagccgctaggtgtcttcagagattgactgttaattcagacaacgcatggtcagtgtcggctcatggtggggtgactgcccttctgaaaatatgttcaagcggtgagttttgaaggggaactgatcggtcttgcttgtg

SEQ ID NO: 49395 - DNA, 421 bp, Gossypium hirsutum
  Clone ID: LIB3197-003-P1-M1-C7
tttgtaaaaaaatctccaatctccataaactgtcagtttattataaatcgcatggtgcgtcatcatctcaaaaaggattatttataacttttccagttcttgttcttttcttctctactttctatatttttttacttttttaactattttccctttttttttattcttatcacttttctcttatttttttaccctcttttcctcttgatcaatacttttctctattttttcttctttttttaatttttttttttttttttctctttttttattttttttttttattttttttatttttccttttttctttttattttttctatttcttacttattttcactttatataattatctttttctaatatttccttttttttaaaatattttattttttctcttctcttttttactttttttttc

SEQ ID NO: 49396 - DNA, 381 bp, Gossypium hirsutum
  Clone ID: LIB3197-003-P1-M1-C9
attttcaaatcgttgacaaggttttttactcttttttgattcctcaaattgtgatttcaggtatttacgttaatcctcaatttccataatttttttccctgttttatattttaattattaaccaatcggcccatcgaaaataatgatcaaatctccaattttcgatccctgccgttacttctagagttcctttcccccaattctcccgagatgcacaactacatccaccaaataatcacaaacgcttcaattcctcagccttccacctctgaaatcaacggccaagacggtcaaaacgatcggcaatgccatgggttctggtacgacgccgttctggtggttcccgcgtttctgttctttgtgtacctggcggtgaacgct

SEQ ID NO: 49397 - DNA, 376 bp, Gossypium hirsutum
  Clone ID: LIB3197-003-P1-M1-D1
cccacgcgtccggtgaaggggaggcaataattgggagcatgactgttgcaccaaacaagaagaatccccgagacgttgatataatggttaaatattcattgagtggacgacgttgtgtggtttcgagagttcaattctataagatgcgctgattttgttgcagagcatttcatcaccactactagctgtaggaggggaccttgtttgcatgttccttaaacgtttcaccaaacatttttttaattccttttctactttctttttcctcgaaaggtttttcctgagaaagaaaaacacataagatgcatgtacttcattaactcaatccaactgttttcttctcatttatgcttcatattgaatcttgtggtttctt

SEQ ID NO: 49398 - DNA, 395 bp, Gossypium hirsutum
  unsure (1)..(395): unsure at all n locations; Clone ID: LIB3197-003-P1-M1-D2
cggacgcgtgggcgcatttcaaattgttatctctgaaggtgtcttaataaacgccttcgatttaccttcgatttccatttacttctctattgctacgtttttgaatttttagtgagcgaaaatgagagagtgcatttcagtccacatcggtcaggctggtattcaagtcggaaatgcctgctgggaactttactgccttgaacatggaatccagcctgatggccagatgccaagtgacaagactgtcggaggaggtgatgatgcttttaacacctttttcagtgaaactggtgctggaaagcacgtncctcgtgctgtctttgtggatcttgagcctactgttattgatgaagtgaggactggtacttaccgtcagcttttccaccctgagcaac

SEQ ID NO: 49399 - DNA, 422 bp, Gossypium hirsutum
  Clone ID: LIB3197-003-P1-M1-D3
gttttatattgattacgggaatcaagaggaggttccatacagtcaattacgacctcttgatccttcattatcagcgtctcctgggcttgctcagctatgtagtcttgcattccttaaagttccgagcctggatgatgaattcggtaccgaagctgctcagtttttgagtgagcagacaatgggaagctcactgcagtttaatgctatgatagaggaaagggatgtttctggcgggaaagtcaagggaaaaggaactggcaccgttctcattgtaactcttcgtgctgagaagtcagaccttagcattaatgctgcaatgctccaggagggactagctaggttggagaaaaggaagagatgggaatccaagatagaaaatcggtgattgaaatttagaagactttcaaaagaggcaaaactgt

SEQ ID NO: 49400 - DNA, 425 bp, Gossypium hirsutum
  unsure (1)..(425): unsure at all n locations; Clone ID: LIB3197-003-P1-M1-D7
atttccttcgccctttcttgttagtgttgggcatctccctctcgtcctatggtggtaagttcaccgtcaagtcttggaagttaaggttttgctcaaatcagaacagtggtttcgaaactataaatatgaagtagaaatatttattttatttctatttttaaggtttacaacatgatagaataattgtgtgaaaattttgttaataaattttattgattgagtgctcaatttgactagaaggactaaattgtaataggtgtcaaacttgatttctataagttaaggtgtctaattgctatgaaattttaaattggaagtccttaaatgataattagaccattatacattaggatggacaaaaatagacatggntagatgtcttctcaatgttttaactaaataaaatattcatctttctaatttca

SEQ ID NO: 49401 - DNA, 375 bp, Gossypium hirsutum
  Clone ID: LIB3197-003-P1-M1-D8
catccttctatctttattttctcgcctgtgacgagaagccgacgctaccatggttcacgtcagtttctaccgcaactatgggaagacctttaagaagccacgacttccgtatgagaaggaacgattggatgctgagttgaggcttgtaggagagtatgggctccgatgtaagagggagctgtggagggttcagtatgctttgagccgcatccgtaatgctgctagggaccttctcactcttgatgagaagaaccctcgtcgtatttttgaaggtgaagcccttcttcgtaggatgaacagatatggacttttggatgagagccagaacaagctcgattatgtgttggctttgactgttgaaaacttccttgaacg

SEQ ID NO: 49402 - DNA, 65 bp, Gossypium hirsutum
  Clone ID: LIB3197-003-P1-M1-D9
ccgtcctaattcccggtcacccaccttctctaccgtccgaaacaccttaaataatcgtgtgctta

SEQ ID NO: 49403 - DNA, 400 bp, Gossypium hirsutum
  unsure (1)..(400): unsure at all n locations; Clone ID: LIB3197-003-P1-M1-E1
caactttcctctggtcaggagagccttttaagtaccatcgtctttgctgggatgcttctcggagccaatacatggggccttttatcagataactacgggaggaggaaaggttttcttactatatctatggtaacttttggagctggattactgagcacattctctccaaactatttaacgcttgttcttcttcgaggtttggttggttttggccttggtggctcatctgtattcttatcctggtttctagagtttattccagcttctaatagaggcatgtggatggtagtgttttctactttctggacatttggatcaatttttgaggctactcttgcatggattgtcatgcccagattaaactggaagtgggtacttgcattttcngctgtgccatctt

SEQ ID NO: 49404 - DNA, 315 bp, Gossypium hirsutum
  Clone ID: LIB3197-003-P1-M1-E11
gagggcatgggatgtggatgatgacactgccacggccctaattggtaaccaaaagggcaaaggcattgtcaagcttgatgccaatttcaagatgcctgaacccaagcccgatcaccgcaaaggaatggccttgaactgtgaagaagctccgttggacaccgacatcaagaatgccggcaacgtcgtgctcttgaacactaaaaacctccctttggtcggccaggtgggtatgggggccgatctcgtcaggctggaaggtaatgcaatgtgctcccctggcttttcttgtgattcagccttgcaagttacgtacat

SEQ ID NO: 49405 - DNA, 97 bp, Gossypium hirsutum
  Clone ID: LIB3197-003-P1-M1-E12
aaaaaaagggggggggggaaaaaaacaaacaaaaaaaacaaaaaaaaaaaaaaaaaaaaagcacagaaaaaaaaaaaaaaggggaaaaacacacaac

SEQ ID NO: 49406 - DNA, 431 bp, Gossypium hirsutum
  Clone ID: LIB3197-003-P1-M1-E2
tacacgccccctcttacttatatcattcaataattttcatcaacaaagaaaaatgagagagtgtatttcgattcacattggtcaggccggaattcaggtcggaaatgcttgttgggaactttactgtctcgagcatggcattcagcctgatggccaaatgcctagtgacaagactgttggtggaggagacgatgctttcaacacctttttcagcgaaaccggtgccggaaaacacgtccctcgagctatatttgttgatctggagcctactgttatcgatgaagtgaggactggaacataccgccaactgttccaccctgagcaactcatcagtggtaaagaagacgctgcaaacaattttgctcgtggccattatacaattggaaaagagattgttgacctctgcttggatcgtatccgaaagcttgctg

SEQ ID NO: 49407 - DNA, 361 bp, Gossypium hirsutum
  Clone ID: LIB3197-003-P1-M1-E3
aaatatggccaggagaagggttgttttggtgcagattttggcactagccttggccgctgttatgccattgctctcaggaggtgtggatattcaacaagttagggtgctggcagctaaattcaacgtgacttgcgtagtggtattcggagactccagcgtggatccaggcaataacaactatattgctacgccctttaagggtaatttcctaccgtatgggaaagacttcttcaaaggccacccgactggacggttcagcaatggaaggctagccactgattttattgctgaagctttgggttacacgaacgaaattcgacctttccttaacaagagattgagaccagttgatatcttgcat

SEQ ID NO: 49408 - DNA, 411 bp, Gossypium hirsutum
  Clone ID: LIB3197-003-P1-M1-E4
gtcccagaatttagtttctatttttgtagtgttttgttgattttgttggtgaatgatggatgttgtgactggggctcctccattcatgttggtcacgagataagccttgcggtgccattggaatatagtgatgggttcactgggagagctttcttgatggatgatggtaatggtcaggtggaaccaaaatttagagttgcattgagtgctgaagctaacaaagggggatattcatgctccttggaagtttttttaggggatgtcaaagtatggaattctggacatcactcccagttttacaccatggatacatgcgtacttgagcttactgaagatggggatttactgttgaagggtgccgaagttcaagtcggatggcggaccggcacttctggccaaggtgtggagaga

SEQ ID NO: 49409 - DNA, 424 bp, Gossypium hirsutum
  unsure (1)..(424): unsure at all n locations; Clone ID: LIB3197-003-P1-M1-E5
ctttcttctccatattttcctctgtggagaacccatccccctcctttagggtttagcagttaaaaagagaaaaacaaaagtatggcgaccgccactgtccccgccgccgcaaggcagctttctcctaaagaagccgacatccaaatgatgttggccgccgaagtccatctcggtaccaaaaactgtgacttccaaatggagcgttacgtcttcaagcgtcgcaatgacggaatctacatcatcaaccttggcaagacctgngagaaacttcaacttgctgctcgtgttattgttgctattgagaaccctcaggacatcattgtccaatctgcaaggccctatggtcagagagctgtactgaagtttgcacagtacactggttgtcatgcaattgctggaaggcacactccntgtaccttcacta

SEQ ID NO: 49410 - DNA, 421 bp, Gossypium hirsutum
  Clone ID: LIB3197-003-P1-M1-E6
atcccaagcaaaacccgatatccttagccttggaggggcattcattcattcattcactggctctagtttcgtttccgtccaacgtaactaccacgccgaccgtcgtaaccaccgccgtaaattctcccaaaatggcgaaactacccttacagatcctcctcctctttctcctttccctcatttcctcctccaccgcagagatcaaaaccctaaccatcacctccgactctcgccccatgatcctcttcgagaaattcggcttcacccactccggtcacatcgccatcttcgtctcctccgtctcggtcactttctccgccaatgcccccaatcccgacgctttccgcctcggcttcttcctcttatccgaggaagctctcctccaagtccttctcgagattcaacagaatcctcacttttg

SEQ ID NO: 49411 - DNA, 95 bp, Gossypium hirsutum
  Clone ID: LIB3197-003-P1-M1-E7
ctatatggaaagctcctacgcctgcacctacccctccttaattccctcttctacccactcacttttttttttcttttaatatatatcacttcaat

SEQ ID NO: 49412 - DNA, 398 bp, Gossypium hirsutum
  Clone ID: LIB3197-003-P1-M1-E8
cggacgcgtgggtttccgtccaacgtaactagcgcacgccgaccgtcgtaaccgccggcgtaaattctcccaaaatggcgaaactacccttacagatcctcctcctcttcctcctttccctcatttcctcctccaccgcagagatcaaaaccctaaccatcacctccgactctcgccccatgatcctcttcgagaaattcggcttcacccactccggtcacatcgccatctccgtctcctccgtctcggtcacttcctccgccaatgcccccaatcccgacgcttcccgcctcggcttcttcctcttatccgaggaagctctcctccaagtcctcctcgagattcaacagaatcctcacttttgcgtcctcgattctcgctacatccagcatctcttc

SEQ ID NO: 49413 - DNA, 367 bp, Gossypium hirsutum
  Clone ID: LIB3197-003-P1-M1-E9
cttttcaattagcttcttgaaagctttatttggttaagaacaggaaaccgcgtgaggagatggcaccaccaattgagactccaaccaagtcctctggctctcaccacgcttcacatcctcctttgaatgaaaggattctttcatcgatgagcagaaggtctgttgctgctcacccatggcatgatcttgagattggacctggagctccaatggttttcaactgtgtgattgaaatcccaaaaggtagcaaggtgaaatatgaacttgacaagataccagcgagggggtttgaaggatacttatcctgatgatttacttgcacctgttttaacggcagtgatagagaaaacacattttgatcctactg

SEQ ID NO: 49414 - DNA, 431 bp, Gossypium hirsutum
  Clone ID: LIB3197-003-P1-M1-F1
cggacgcgtgggatttttcctgcattttctccctcgccaaacagaaatcttagttcatttctagacgcagggaacgatggagaaagcgatcaaccgacagcaagttttgcttcaacaccttaatccttcagcttcttctttttcgtcgcaccaaaacaactctgccctctctgcatcggcttgtttagctggagatagcgctgcttatcaaagaactaatgtatttggagatgatgtggtgatagtagcagcatataggaccgcgctttgcaaatccaagcgagggggtttcaaggatacttatcctgatgatttacttgcacctgttttaagggcagtgatagagaaaacaaatttgaatcctagtgaagttggggatattgttgtgggaacggtcttggcaccaggatctcaacgagctagcgaatgtc

SEQ ID NO: 49415 - DNA, 220 bp, Gossypium hirsutum
  Clone ID: LIB3197-003-P1-M1-F10
cccacgcgtccggggattacccgctgagtggaagcatatcaataagcggaggaaaagaaacttaccaggattcccctagtaacggcgagcgaaccgggaaaagcccagcttgagaatcggtcgccatcggcgtccgaattgtagtctggagaagcgtcctcagcgactgaccgggcccaagtcctctggaaaggggcgcctgaaagggtgagagcccctt

SEQ ID NO: 49416 - DNA, 360 bp, Gossypium hirsutum
  Clone ID: LIB3197-003-P1-M1-F2
cttgattcctttttgtcaaccaagcatcccacccggactgttagttcgccgtttgatcaatttcccaaccttccctttttgtttaatttcctaccccaattttcgccacaaatctaatccaaaatgagctggtggtgggctggtgccattggagctgctaagaagaaatttgaggaagatgaagcaccgagaagcttccagagcgttggtctgatcattggagccaccggcatagtcggcaacagcttggctgaaatcctcccgttatccgacacccccggtggcccatggaaagtatacggggtggctcgtcgggccagacccaactggaacgtcgaccattcaatcgagtacattcag

SEQ ID NO: 49417 - DNA, 436 bp, Gossypium hirsutum
  unsure (1)..(436): unsure at all n locations; Clone ID: LIB3197-003-P1-M1-F4
gcaaacaaaaaaaaaaaaataaatggaaaaaatgacaaatgcaaaagaaaagtaacgaaaacaggattgaaaagaaacaaaaacaagaaaaaaaaaaaaaagaaaattaaaggtaacaaaaaaaaaaaagaagtaaggaataaaaaaataggaaagaataagacgaaaaagaaagtcaagataaaggattaggtgaaaatagaaaaaaggaggaaaagagaaaaaaataaatagaaaagaaaaaggcaaaaaataaaaaaagcagagaaaaaatgacataaagacaaaagataaaaagaaggaaagaaagataaaagaaaaaaaaaaaaagtaggggaacctaaaaaaataaaaaataaatagaaaaagtaagaaaaaaaaaacagtttaaagccaaaagaaaaggaaaaaaggaaacangaggacaaaaaagaaa

SEQ ID NO: 49418 - DNA, 287 bp, Gossypium hirsutum
  Clone ID: LIB3197-003-P1-M1-F5
ctcaaaacaatttcccattctctgtcatcctctcttcttaccacacaactccatgcttctccagagagcaaaaagattttttgtgtgttttacaaggccaacaattactttacgaataatcccaacttttttttttgtgtggagggagccttcgtgttgcacccatagctgtaatcacatgggcatcattatatttttacctactacaaagaatgaccttactgcgaactttaaaaacatatccctgatctccatgtgctcatatctaccccattccacctctctta

SEQ ID NO: 49419 - DNA, 438 bp, Gossypium hirsutum
  Clone ID: LIB3197-003-P1-M1-F6
cggacgcgtgggcggacgcgtggggttatgtgagagtgctgataatgaattgccaattagaagcagcaggtcacagggcatgaatttatcagtttggggtagaatcggtagctccagaagtagaatagaagcaaaagataaaattgatcatttaccctcagaccatcttgagaatgaaaccaagaaggaacaagaaccatttcctagctcacaggacacttcctgtcaagttaagcggatctgcagtgaggacgatggctccaaagttatggatttgtcattgaagtcacagatttattcgcatagtcgcagaaaacctactcaaaaggcactccgtacactgtttgtcaatgggattccccagaaatgcaacaaaagagaggctcttctgtctcattttcgtaaatttggagaggttgttgacatttatattccaca

SEQ ID NO: 49420 - DNA, 88 bp, Gossypium hirsutum
  unsure (1)..(88): unsure at all n locations; Clone ID: LIB3197-003-P1-M1-F8
gagcgtccaacaatcttcgtctctttctcttgggggccgtttttctctctgaggggtgattcttgttatagntcgggtgntttatgtt

SEQ ID NO: 49421 - DNA, 423 bp, Gossypium hirsutum
  Clone ID: LIB3197-003-P1-M1-F9
cggacgcgtggggttgttgttgttgtcgtcggggtggcttctcttcctttcatctgcttcttatctttctttataatctccacaacattgacgtcagccggcgccgccgccgccaccatcaaactctccctctctcccttccctcacccttcttcctcccatccttaccaaattctcaacaacttagtcacttcttctgttgcaagagcccaccacctcaaacaccccaaagccaaggccgataatactacctcttctcttctcagggcttccctatttcctcacagttatgggggctacactatctccctcaaatttggaactccgcctcaaacccttcctttcattatggacactgggagcagcctctcctggttcccttgcacctctcgttacctttgttccccatgcgccttccccaat

SEQ ID NO: 49422 - DNA, 430 bp, Gossypium hirsutum
  Clone ID: LIB3197-003-P1-M1-G1
tgaatttttatgactatggctagttcgaacactcctatacctgtggacgatgggtttaatgagtatgaaagtgttgccaaacgtcaaaagtctaccacttcaaaggtgggggatgaaatgacaaagcttgaatgcgagaacaaaaatgaattgaaggcacaatgtaatcactgtaagactattttctctgctaagtcttctagtggaacctctaatttaagatgtcatctaaatagctgtttgaaaaaaagttaataatgacatcactcaatacaccatagtcactcaaccatcactagaaggtgttccatctataaaaaactacaagtttgatgttgatgagtgtcgtcaagctatttctacttttcttgtgtgtggcaagcattcatttaggacagttgaagaaccgggatttagatacatgatgaga

SEQ ID NO: 49423 - DNA, 424 bp, Gossypium hirsutum
  Clone ID: LIB3197-003-P1-M1-G10
tttcaagctaagaagaagaagcacaaagagaaccctaatggatcttcatttcgtcgccattttagctctcattatcttccttataaccccaaaaggtgtatatggtgcttcgttcacattcatcaaccggtgtgattacactgtatggcctggtatattagcaaatgcaggtactcctagtctgggaaccaccggattcgagctcccaaaagactcttctcgttcattccaagctccgacgggttggtccggtcgtttttggggtcgaacggggtgtaaattcgacggatccggctccggaacttgtgtcactggcgattgcgggtcgggtcaagtagaatgcaacggactcggtgctgttccgccggtgactctagcctgagtcacttcttggaacaaccggtggtcaagatttttacgatgt

SEQ ID NO: 49424 - DNA, 383 bp, Gossypium hirsutum
  Clone ID: LIB3197-003-P1-M1-G3
cggacgcgtgggcgaaggtattacatatgattactaggaattcatgggaaacagagccgttactgtcagaaggtaagtttagttctatggataatgatgagattgtgagttcacagaacctgtcttctactctgaggaaactgtgtatgtgggaaaagaagctctatgatgaagtcaaggctgaggaaaagctgcgcatgattcattcaaagaagcgtagccagatgaggattttggatcacaggggtgctgatgctcaccgagttgactccacacgaacttcaattagggccttatctactaaaatgagagttgcagttcaagttattgacaacatagcaattactataaataaggtgatggatgaagagttggggcacaga

SEQ ID NO: 49425 - DNA, 428 bp, Gossypium hirsutum
  unsure (1)..(428): unsure at all n locations; Clone ID: LIB3197-003-P1-M1-G4
atttcctccacctccactcctctcctatcccaggttatttctaaatatgtaactggttaattttaattttaattgcagaaaatatttagtactcacaaaattaactacatttaccgcaatttcagcatttcgtcgttaatcctattttcttgtccgatcccatcccatccacactcttcgctctctttcctttaatctgttttcattttctgtcatttgcaaattgaatttttggttcttgaattctaggtttagggttttgagagatggggcaacagacgttgatctacagctttgtggctcgtggcacggtgatcctcgctgagtataccgagttcaccggtaacttcacaagcattgccggtcaatgtctccagaagctccctacttccaacaacanaattacctacaattgcgatggccacacc

SEQ ID NO: 49426 - DNA, 327 bp, Gossypium hirsutum
  Clone ID: LIB3197-003-P1-M1-G8
tcgctcatattttctcatctctcccactttttttcttggcttctaatacccaatggccggggtttctcaaatcttcacaccgagtctggtcttaaagctcttaatgacttcctctctggaaaatcttacatctttgggaataagctgaccaatgatgacataaaagtttatgctgctgttctgaagaaccctggtgattcttttcccaatgttagccagtggtataatttctgttcttctcaacttgcggccagctttcctggcaaagctgttggcgttggggttggtggcaaagctgctccagctgagtctggttaagctgaggct

SEQ ID NO: 49427 - DNA, 364 bp, Gossypium hirsutum
  Clone ID: LIB3197-003-P1-M1-H10
tctggttaattttgccggctgaaaccatctagtgataataaaacaaaaaaccgagcgggtctgttttaagcaagagattcttttgcagatagagccatttggtgggtttatttattttgtgaattgggtgattgtatttattgcaggattttgtttaaagagagatccaaaaatggcagggaaaatatcggctgcatcagctcgggctcacactataaaatctaagcaaaacacttccttcaagcttctctcatggatattcacaaagacactattggttttgtttgtgggagctctggcatgggcttatcaggccattcagccgccgtcacccaaaacttgtggatttcctgatggtccactc

SEQ ID NO: 49428 - DNA, 428 bp, Gossypium hirsutum
  Clone ID: LIB3197-003-P1-M1-H4
aaagtagcttgctatgtttctgatgatggttcagctatgctgacttttgaagcccgctctgaaactgcagagtttgcaaggaagtgggtgcctttctgcaagaagcacagtatagagcctagagctcctgagttttattttgctcaaaagattgattatctaaaggacaagataaagccttcttttgtcaaggagcgtcgtgcaatgaagagagaatatgaagaattcaaggtgcggatcaatgcccttgttgccaaagctcagaaaatgcctgaagaaggttggacaatgcaggatggaacaccatggcctggaaataacccaagagatcatccaggaatgatacaggtgtttctaggtcatagtggggggcttgatactgatggaaatgagctacctcgccttatctatgtttctcgtgagaagcg

SEQ ID NO: 49429 - DNA, 436 bp, Gossypium hirsutum
  Clone ID: LIB3197-003-P1-M1-H5
ctcaaattttagattctggcggttagggtttggtaattagggacgacgtggctcaatgacaatgagtgagaggcagacaatcgaccttgagcaaggatgggagttcatgcaaaaaggaattacaaagctgaagaatattcttgaaggcttacgagagccgcaatttagctctgaggattatatgatgctttatacaaccatttacaatatgtgtacccaaaagcctcctcacgactactctcaacagttgtatgataagtatcgagaatcttttgaagaatacatcacttcaacggtacttccatctctacgggaaaagcatgatgagtttatgttgagagagctagtgaaaaggtgggctaatcataaagtaatggttaggtggctttctcggttcttctactatcttgaccgctactttatagcccggaggtca

SEQ ID NO: 49430 - DNA, 394 bp, Gossypium hirsutum
  Clone ID: LIB3197-003-P1-M1-H6
gagttctccctttctctctggaaaaatcccagatcccggccaggaggagttgccggaccaccgcagggtcaccgctggccaccgcgcggtgctggagttctgaagtcttagactgtccacattgattttttcttgtgtgttatttgccttttttttcgatttttgtttctttttattctttcttgtgttttgaatttttttgtatttttattttttttttaatttttgactttttttaatatttcttttttttattttttcttttttttgtatatttttttatgttttttttttttatttattttattgtttttttattttattctattatttttttttcttttatcgttttttctatgtttagttatgtattctattcatctttttttttttt

SEQ ID NO: 49431 - DNA, 265 bp, Gossypium hirsutum
  Clone ID: LIB3197-004-P1-M1-A1
agaaaatgggttggatggggaagttgaagcgaagggccttcgatcaagttaccgccgacttttccgttttttggttttcgtggccggccaccagaattggccggtgggaggctgattggcccccattaatgggggagaactccttcctgtgaattacaaaaagggccttggtctcttttacccaaacccactttttctttatgacacacactcccttgtgtttccctccttttaccctctccttctctttgagtctcacctcctc

SEQ ID NO: 49432 - DNA, 416 bp, Gossypium hirsutum
  Clone ID: LIB3197-004-P1-M1-A10
tatatctctccctcacgcttctctgctcttcttcaaaaccttgttttcccctttaagtttgattgctattctttgcttttagcaaaactcctattcttttgttcttttttttttttaatatctgataatgttgtttcacttttagctcttcttctgttttttcctcgtacgggttaattttcgaccgctcaagatcaaaccgaacagataagttctaagcatttgaaaaagcaaaaaaacccaacaatggcgccgtcttttgatttatgggcaaaaggcagccataaaggtacaccagttgttgtcaaaatggaaaacccaaactggtcaatgttcgagcttgaaggtccatcccaagacgatttcctcatcggcaacaccccgacccggtttttgagaaaaagcgcgcgggaaaa

SEQ ID NO: 49433 - DNA, 423 bp, Gossypium hirsutum
  Clone ID: LIB3197-004-P1-M1-A2
gaaactgatggtgatcgtggaatgtggtcgtaagtattttgtcgctcgatttgccttaagctgtgaatcaatgacctagtaagccttgaattggttcattatccttcccccattctttagaatattttactatatatttactaacgctcacatgctactttgtatgtctggacttaagagagcctttaagaagaaaaacttggtaacaaaattttgtgattctagtctaaccaactcagcataagaatgattacctgactacaatatggggtaactaagttatgcgtcctataatattcttttgcctttttttcttaatctttctcttagtaagttacctgttgtggttattacattacaagaaaaagtgtgccaatgtttatagtggcattggctattggtacgtttttacttttagatata

SEQ ID NO: 49434 - DNA, 298 bp, Gossypium hirsutum
  Clone ID: LIB3197-004-P1-M1-A3
gcatattcgctgcgtcacatagtactccaataccctggtttacctgaaccggaagtaagatccggttcaatctcatagtaaaaccaaaacttttgttttccttagtattctttctctaaaatcaaaatccaaatggaaaagaaaggcttgacaatattttgatttctgtaaaacgcatagaagagagagtactttatctttaaaaccataccggtaaagagaaagttccgattttttttttttcatttctttcaagctcaaccaaaatatattaaagggaaacctaacttgccggagc

SEQ ID NO: 49435 - DNA, 366 bp, Gossypium hirsutum
  Clone ID: LIB3197-004-P1-M1-A4
ttcaaagtgaagaactgtctatcagactattgccatgcgttagggatacatactggagggatccctaatttttgagggagttttatttcatttaatgaaggcattccagtgtggttttcttgatgctctggaatttcttatttaatgtttttggctgacttatttttgtttgttcggttcaaatccaatttatgaccacttccatgatgataaatagggagttacttttcatgatgacaagaaattggttaagttgcttggactttcgggtgcattattctgaacttacatgggcgtgctatcttaagccacaaagcaaatgtttaaggaagttttcatggattttgatacatgcctcttttttta

SEQ ID NO: 49436 - DNA, 432 bp, Gossypium hirsutum
  Clone ID: LIB3197-004-P1-M1-A5
gttattatattagtgcctttattttgttatttttggttctaatgtccacttcttgccttagctgtctttatagttttatgatctattagttcctctattttttatatgataagagttgccacgtgatttgctatcttgcttctatgggatttcaagaaaaatatgttgttgaatgtacttgctcttttaggttcgtactttattattatggttatgctttttattccgacactttatgatttaagtaccagtgtccggaacccatggatgtgggagaacttggaaaaaaaattgaacatactcatctcagacatgccttcatacccatatctgacatgtctttatactgacacctaacactcatacctaagtccgggtaacatgggttttttctttttcaagttctaaattgtttacaatagtttttttgtt

SEQ ID NO: 49437 - DNA, 142 bp, Gossypium hirsutum
  Clone ID: LIB3197-004-P1-M1-A8
tcataaaagctagcgcttgaatatggctgagagacccattaaaatggctgtgggggattctatcaaactacctgtttattactttctccctctagtaaagcaacttattgataaataatacctacatcgtccatatgcacaa

SEQ ID NO: 49438 - DNA, 382 bp, Gossypium hirsutum
  Clone ID: LIB3197-004-P1-M1-B1
atataattttgatagtataatatggagaaatggtatggggtttcagggctggtgtgggttttgagtttgttgtttggggttaaaggagaaccccaagtcccatgttacttcatttttggagattcattggtagataatgggaacaataatgaacttcgttcattggctagagctgattacttgccttatgggattgactttgctaatggaccgaccgccggttttcgaacggtcgaactacggtggatgtcatagctgaacttttggggtttgacgattacatccctccatactcaactgcaagtggtagacaaatactgggaggagttaactatgcatctgctgctgctggaatcagagaagaaactggcaacaactggga

SEQ ID NO: 49439 - DNA, 164 bp, Gossypium hirsutum
  Clone ID: LIB3197-004-P1-M1-B10
ttaaaactatgcagctttcttcagcacaaatccacgggctgtttcagaccagtggtggctattaccgtcctttattgagcggctgcttcctgtacttcgagtcactattttggatattacgcgtctacctttattgcaaaagacttggctcagatcttcaataa

SEQ ID NO: 49440 - DNA, 313 bp, Gossypium hirsutum
  unsure (1)..(313): unsure at all n locations; Clone ID: LIB3197-004-P1-M1-B11
ggggacgcggcgcngcngaccggccgaatcccggtcaccacgcgtccgactagagatccaaattaccaaaacggctccgcgctctgtgttgatcgcgctagactgatttcagcctatcttatcgagtctcaaagcgccaaaaggcggagcgtgtacttgatatagaaagctctggtccagaggaatccaatcgagaggacaaagactaataaacttgttgcgagccatcatccttatgacaagaagacactagcctacattctgaaagagcatcacaattgactgagcatggatcttaacactgatctatgtt

SEQ ID NO: 49441 - DNA, 421 bp, Gossypium hirsutum
  unsure (1)..(421): unsure at all n locations; Clone ID: LIB3197-004-P1-M1-B2
ctttgcttcactaaagtatacaaaccttgttcttctattttagcttctcttcacattgagaagctagctttttggtgcgtttgcttagcttcaacccacattgtctttgttgcgaagatggttgcacacaaatttaccgttgatttgaataaaccccttgtcttccaggttggtcaccttggagaaagttatcaggagtgggttcatcagcctattgtgagcaaggaaggtcctaggttctttgatagtgatttttgggagttcttgactcgcactgcctggtgggcaattccaaccatatggctgcctgttgtttgctggtgcatttcaatgtccgtacgtatggggcatacacttncccanaccgctttaatgggtgcttttggcattnttctgtggacatttgtggaatatgttttac

SEQ ID NO: 49442 - DNA, 331 bp, Gossypium hirsutum
  Clone ID: LIB3197-004-P1-M1-B4
cccacgcgtccgggagtagttgtagtcaaacagcttcctaggcgacctctctggtcactattttaagttgtaagcatggcagatggatcaaagcgtccatcagtgttccataaaatgcatggacagtcctatttcatttccaggcttacgcctagcttgcctgctcagaattataacatgactggtgcctataccaatggaggaattcatgttgctttacagccatcacgtcattccactgggttggcatatatgcccactgtttctcccatatttgtacaagctccatcagagaaaggttttactgggtttatggtggatttcctcatgg

SEQ ID NO: 49443 - DNA, 289 bp, Gossypium hirsutum
  Clone ID: LIB3197-004-P1-M1-B5
ctcgctacttccgtcctaattttcaggaaaaaatcgccgccgtgattcaaaactcagcccactgtctccgatcgtgtcaactcgtaacccaatctctcaaatatggatcgacccagattcgtaatcgacgccgtcgaagccgagcaaatggccaaacaatcaggcaagacggtgctccaactccttccttctttggtcaaatcagcccagtccgttgcccgcccgccgatctcgaagtaccaagttggggcagtcgggatcgggtcatcccgtcggatctttttcggag

SEQ ID NO: 49444 - DNA, 367 bp, Gossypium hirsutum
  Clone ID: LIB3197-004-P1-M1-B6
aaagaagcagcagcaactaaagctttgaggaaagggcgttggctttcgatgagtgcgggagacccttcattatactcaaagagcaagaccagaaaaccaggctgagagggatcgatgcccaaaaagccaacatttccgctggcaaagccgttgcccggatcctccgaacctctctcggacccaagggcatggataagattctccaaagccccgatggcgatgttaccatcacaaatgacggggcaacaatattggagcagatggatgttgacaaccaaattgctaagttgatggttgaactatctcggagtcaggattacgaaattggtgatggaacaactggtgttgttgtcatggctggagcact

SEQ ID NO: 49445 - DNA, 273 bp, Gossypium hirsutum
  Clone ID: LIB3197-004-P1-M1-B9
ataaaatccatatgaaatcacaaaagatcccaaatagccaaagcaataccaagcaaaaggttacatcacactacctgacttcaaggtatattacaaagctatagtaaccaaaacagcatggtcttagtgtgaaaatggacacatcaaccaatggaatttaatggtgaacccacaagatagatcacatatttggaggcatctttcttttgactgggcgccaagagcatacattgggggaagacagtcttttcaataaaccattctgggaaaact

SEQ ID NO: 49446 - DNA, 374 bp, Gossypium hirsutum
  unsure (1)..(374): unsure at all n locations; Clone ID: LIB3197-004-P1-M1-C1
attgcactgctctttctttctatagaattaggcactcctgttctagatgaagggtctctccccaattcttgcttgcctagcgcttgctgtggtggtaagccatgctgctctctcacctgagcaatattggagctataagctgccaaatactccaatgccaaaggctgtcaaagaaattctacatccagaactgatggaggagaaaagcacctctgtaaatgtaggaggtggtggtgtaaacgtcaatacaggaaaagggaagcctgngggtgacacccatgtgaacgttggaggcaaaggagttggagtgaacacgggaaagccagggggtggcactcatgtgaatgttggagacccttttaattacctatatg

SEQ ID NO: 49447 - DNA, 211 bp, Gossypium hirsutum
  Clone ID: LIB3197-004-P1-M1-C10
tgtttataaaaaaccggctcttttcatgcggtgggtaaacataggggcgggagcgactagctaatcttcattttctaacgcacataaagtaaccttaggcatatcatcatatccaccttaatttttctatttgccggttcagcatcaggcattgatatgaatacttttatacacttgttctgcaacatcaattcactgttattatttgccc

SEQ ID NO: 49448 - DNA, 251 bp, Gossypium hirsutum
  Clone ID: LIB3197-004-P1-M1-C11
gttaacggcacttgcacatgggttattggatggtaaaatacgggggaggccggggcgacagcacgttcagcgcgagcttctaaagggaatcgggttaaaattcctgtaccggtactcggcggctgactgcaacgtatgggagtccgtatacttttgcgggggcctctggaagagttatctttattgtttaacggcctgcccaccctggaaacggctcatccggatgtagggtccagcggtctgaatatcac

SEQ ID NO: 49449 - DNA, 432 bp, Gossypium hirsutum
  Clone ID: LIB3197-004-P1-M1-C12
agaaaaacaaaaaacactcccgaaatggcacgcaagaagatcagagagtacgattccaagagattgttgaaagaacatttcaagaggctttccggtagagatttgccaatcaaatctgcacaaattacggaatcaactgatttcaatcagctagtagagaaggagccatggctttcgtcacagaaactggttgttaaacctgatatgttgttcggtaagcgtgggaagagtggtttggttggcttaaatctggattttgctcaagttattgctttcgtgaaagagcgccttggcaaagaggtggaaatgagtggatgcaagggacctgttacaactttcattgttgaacctttcatccctcacaatgaagagttctaccttaacgttgtctctgagcgacttggttgcagcattagcttttcagaatgtgga

SEQ ID NO: 49450 - DNA, 388 bp, Gossypium hirsutum
  unsure (1)..(388): unsure at all n locations; Clone ID: LIB3197-004-P1-M1-C4
tgctcgtccacgtcatcgacggcttctccagcttcaccttgttcaaagcagacaatattggatgccgcagctgctatttccgagggaaaaaacgacgtcgttaacgagatcctgacccgattagctcaagctgctaactcaaaaggtagctcagaacagaggttgatggagtgcatgctatcagctcttaaatctagggttaactcggttgaaaacccaccaccggtggctgagttgttcagcaaagaacacgctgcttcaactcagttgctttatgatctgtctccttgttttaaactcgggttcttggctgctaatcaggctatcctcgatgccactttagacaaaccaagctgtaataangttcatgtttgtgattttgatttcg

SEQ ID NO: 49451 - DNA, 292 bp, Gossypium hirsutum
  Clone ID: LIB3197-004-P1-M1-C5
agctgtttattaaggaaactgggaagaccaagtacagaaaaaaaagggaagatgagcgagattgaagctaggtatccaatttcaaccatgcgtttgcccatgatacatatcgctggtgttaaatatctgcaaagtacgaaatggttcgagagcgaatgacttaaatgcggatgggaaagagttggagtatcattaatccagctgtgactccgctattatatcatttgatgacattttgctctacttgtacaatccatggtgcggatactgataacgtcttgtcacccagtta

SEQ ID NO: 49452 - DNA, 239 bp, Gossypium hirsutum
  Clone ID: LIB3197-004-P1-M1-C7
gtcaccgaaatgggacgtctggtttccgaagggtatgttttaaccggtttagcgcccaaccaccaagcaattgccaatctaaccacggaccaatttaaccaaaccagcccccccgaaccaaatcatatttcacctattaatccacaagtcccacacgggggaaagtattccaatgctgagaggatattttgaaaagtgtcttacgatacattgaggttgccgcataaagtgttggctca

SEQ ID NO: 49453 - DNA, 405 bp, Gossypium hirsutum
  Clone ID: LIB3197-004-P1-M1-C8
gtgaagaaaaaaatggttggtgtgtttaggttagtgagggggtatccgggaccaagtggctttggttcagcctccaccgcccaagaggttaccgaagggattgatggaaccaacttgactgctctagttaccggaggagcaagtggaattgggttggaaacttctagagtattggctcttcgtggagtccacgtcatcatcggtgcaaggaacatgaaagccgcgaatgaagcaaagaacaaaattgttagagagaacacaagagcccgtatagatgttctggagctggatctttgctctactagttcaatcagatcatttgccgacaatttcattgctcttcatcttccttttaatatcttaataaacaatgctggcatcatgttttgtccctttcagctttct

SEQ ID NO: 49454 - DNA, 104 bp, Gossypium hirsutum
  Clone ID: LIB3197-004-P1-M1-C9
ctcaataataaacctgtccttctctataggcgtgttagccaaagttcaagggcgcataactattcatcaccctccacccacatctaaccaatcctttgcatata

SEQ ID NO: 49455 - DNA, 394 bp, Gossypium hirsutum
  Clone ID: LIB3197-004-P1-M1-D1
gttcttcttgctgtgatcctgggtagcaccaggattttcatactattcctccggccgcgccacctatcatcttccccgaagtctgattccatggctgcccggagctttgttctttggcttcacgggcttggtgactctggtccagccaatgaacccatcaagacactctttaggtcttccgagttccgaaacaccaaatggtctttcccttctgcccctgaaaaccctgtcacctgcaattatggaatgcgaatgccttcttggttcgacattcaggagattcctgtcacagccgattctccaaaagctgaaagtgatgtccttaaagcagttcagaatgtgcatgcgatgatagacaaagaagtagctgctgggacggatcctaataacgtat

SEQ ID NO: 49456 - DNA, 57 bp, Gossypium hirsutum
  Clone ID: LIB3197-004-P1-M1-D10
actatataggaaagcgtcgccgcagtaccggtcgaatttcggtcgacagcgtcgttt

SEQ ID NO: 49457 - DNA, 449 bp, Gossypium hirsutum
  Clone ID: LIB3197-004-P1-M1-D2
aaaagaaaaagaagaaaaaataagtcaaaaatgattacagtggacagaaaagaagcataaggactataacaaaagtaaaagggaggagaaaacatgtgtcataagaaaaaaagaaataaaagattatcgaaaaaaaaagcaaaaatataaaaatataaaacatatggcaaaaatattcaaagaaggataaccatttaacaaggatcagagaaggttagaaataacaaagaaatgaaaacaaaaagaatagaaataacaaagggaactaacgaaaactgaagaaaaatagtacaagaacgcatatagttacccagagagaagaaagagaggaataagaacccattgaaaacttaaaaaaatcgtaagaaacaaaagggaaaaaaagttgtactaaagaaaaaaaaaatttaaaggcgaaaaaccagaatgaaaattaacaagaagacaaa

SEQ ID NO: 49458 - DNA, 415 bp, Gossypium hirsutum
  unsure (1)..(415): unsure at all n locations; Clone ID: LIB3197-004-P1-M1-D3
tggaaatatcttatgatggagttcaaacatcaaacatcgacactctcattgatctttcttcttatgatgcctggttttgccctttctgatgtcaatcaagacaaagcagaatgttctaatcagctagtcgggcttgctccatgtctcccatacgtaggcggagaggcaaaaacacccaccatagattgttgcagtgggctcaaacaggtgctggataagagcaagaaatgcctgtgtgtgttgattaaagataaagacgacccgagcctcggcctcaagatcaacggtactcttgcgggaactcttcctagtacttgtcgagccagtgctagcatgacagaatgtatctccctgctgcacttggcacccaaatcccaggaagcanagttatntgaaggatatcaaaagctgatag

SEQ ID NO: 49459 - DNA, 338 bp, Gossypium hirsutum
  Clone ID: LIB3197-004-P1-M1-D4
aatcgatctcccgagagtgaagaagatacagagtacaaactagatcgaggtcttctgataaaagcttcaaattgatattgtctgggtagattgcttcttggtaaccaagatggttgtacttgcggcttcaattgtaagcaagtctggaaaagtgcttatctccaggcagtttgtggacatgactcgcataagaattgaaggacttcttgctgcttttactaaaatggtgggaacaggaaagcaacacacatatgttgagactgagaatgtgcgatatgtttatcaaccaatagaagctctttatttgcttcttgtaacaaacacacagagcaacattc

SEQ ID NO: 49460 - DNA, 344 bp, Gossypium hirsutum
  Clone ID: LIB3197-004-P1-M1-D5
cggacgcgtgggtgcgtcttcgacttcgcttgtctaattttcgagaacactggaatatactgatccttcagttttgtcagagtaaccatgggttgagatgctgatatggaagattatggattcgagtactctgatgaggagcctgaggagcaagacgttgatattgagaatcagtattacaattccaaaggtgtggtagaaacagaccctgaaggagcacttgttggttcttctgaagtagttatgcatggatgctgaaaaggctgagtgggagatgctaacatacatcaaatcagcagtgacacgaaactacagtgaagaatgtatgaacaatattatggact

SEQ ID NO: 49461 - DNA, 358 bp, Gossypium hirsutum
  Clone ID: LIB3197-004-P1-M1-D7
aatacattctacttctttcttcatgcgggtcttcaattataactgacggggtgcaagaaccttaattaaatatatattctatgaaagggaaatgcctatcacttcttttttgaatcaatgacctcaaggcacttatgttatcattattcttatgtgaatacatctatcattcaagctcatattaaatacccattattcatatttccgtttatttaacaaattatctacttttcaacttacactgcttaagacatgtatttccatattcatttttatctatcactctcactttagacacccacctttttatgctatgcttcttaaatccttattatctaatattattctcaacttattt

SEQ ID NO: 49462 - DNA, 161 bp, Gossypium hirsutum
  Clone ID: LIB3197-004-P1-M1-D9
ttagaagaaaccatccaagccccaacagacaagacagctcctcggtatctgcgggtcaaaatcaaaatcaaaatcaaaatcaaaatccaaagatctaaatctaaatccgtctcctctcctttctctttctttaaccttacaattaaggaaagaagatgaat

SEQ ID NO: 49463 - DNA, 399 bp, Gossypium hirsutum
  Clone ID: LIB3197-004-P1-M1-E1
aaaaaatatgggtttccaaagaaacatattgggtttccttttcttgatattggctgcactaacaagcctctcttctagccttcctagtgaatactccatagtggaacatgagattgacgcatttctttcggaggaaagggtgttggagatcttccaacagtggaaagaaaagaatcagaaagtgtaccggcacgccgaggaggctgagaaaaggtttgaaaatttcaaggggaatttgaagtatatcctagagaggaatgcaatgagaaaagcaaacaaatgggaacaccatgtgggattgaacaagtttgctgatatgagcaatgaggagttcagaaaagcttacttgtcaaaggtgaaaaagcccatcaacaaagggataaccctgtcaaggacatg

SEQ ID NO: 49464 - DNA, 296 bp, Gossypium hirsutum
  Clone ID: LIB3197-004-P1-M1-E11
cggacgcgtgggtggtcgacaatcgacaatgcgcacccagcagctaacttgttgggtttatttttgttcttcagtctgaaaatcagtgagagatcgaagagatggcctttttccttggacaaagtagccttgcgaaccacttccgatcttatcagaaggcagaggcttccatggctgtgccaacacgagcatttcatgttgaacttggggatcgtgagaaagctctcttggcaaaggacccttcgttaagtcgttttaaatcttataagaagagtgtgtcgacactgaagagaatt

SEQ ID NO: 49465 - DNA, 66 bp, Gossypium hirsutum
  Clone ID: LIB3197-004-P1-M1-E12
tcttttacacttgaatggtcaacaatccacggttcgctcccattaggtaactggttggctcttatt

SEQ ID NO: 49466 - DNA, 394 bp, Gossypium hirsutum
  Clone ID: LIB3197-004-P1-M1-E2
ggaagagcttcctttttttttttctctccttgggcaccgccgtcgatctcgatgcttatcctcgttttcaaacaagctcgaaaaagatggccaacgctgcatcgggaatggctgtgcatgatgattgcaagttgaagttcttggagctcaaggcaaaaagaacccaccgcttcattgttttcaaaattgaggagaagcaaaagcaagttattgtggagaagcttggtgaaccaaccgaaagctatgaggattttactaaatgtctccccgctgatgaatgtcgatatgctgtgtacgattttgattttctaacggccgagaacgtaccgaagagcagaatctttttcatagcatggtctcccgacacgtcaaggatcaggagcaagatgattta

SEQ ID NO: 49467 - DNA, 317 bp, Gossypium hirsutum
  Clone ID: LIB3197-004-P1-M1-E3
gattttccgaaagctgaattggccggaactctgaccaaaatacctcaggtgcaggtgatcaaagagaatgggaagaggaaaaatagagataaagaggatcgaaaacacaacaaatcgtcaggttaccttttgcaaacgcaggaatggcctgctgaagaaagcttacgaactgtcagtcctgtgtgatgctgaagttgctctcattgtcttctccagtcgaggccgtctgtatgagtactccaacaacaacataagatcaacaatagacaggtacaagaaggcttgctcagatacttctaacacaaacactgttactg

SEQ ID NO: 49468 - DNA, 247 bp, Gossypium hirsutum
  unsure (1)..(247): unsure at all n locations; Clone ID: LIB3197-004-P1-M1-E7
tacaactcctgataattatcttcaaatgttggaatatanaaatggaaggagtgggctccaccatgcttggccgagcttccgctaggtactgtggttcaacggcagtgttcaatggacctgtgaggaagtggaagaagaagttggttcacgtgtcgccttcatccaccgctaaactctctcaatccaactggaacggttccgcctcctccaacatccttctttgtaggtggaccccactcttctttgc

SEQ ID NO: 49469 - DNA, 398 bp, Gossypium hirsutum
  Clone ID: LIB3197-004-P1-M1-E8
tcgataagtttagatggttgatcttcaaatgggggtaaataataagggggggggggggtataataaactattccaaattaactttatttatgttttttaaatcattttttattttatttttgttgttgaacaaaaaatttttttttaaaaatttttaaattattttttttagatcttaaaatttttttttttttttaataaagtcttttttttactctttactacatcttatattaatattaactgttttaaaaaggtttttaaattttttaaaaaaaaaatttttcttaaaaaaatgtttagttttttaaaaaaaatttacttagtttacaagcgatatttaattttaaaaattttttaaattcttttttgggaaaattttttggttttttaatttt

SEQ ID NO: 49470 - DNA, 434 bp, Gossypium hirsutum
  Clone ID: LIB3197-004-P1-M1-F1
ctctccgcaacaatgtttcgatcagtagctcgatcggccgccggaaagcacctcctccgccgaggatatgccactgaatctgttcccgaccggaaggtcgcggttttgggcgctgccggaggtattggccagcccttggctctcctcatgaagcttaaccctcttgtttctcggctggctctctatgatatcgctaacactcccggcgttgcagctgatgtcagccatgtcaacaccagatctgaggttgctggatatgttggtgaagatcaattgaagcaagctttggagggatgtgatgttgtcatcattcctgctggggtgccaagaaagcctggtatgactcgcgacgatcttttcaacatcaatgctggaatcgtcaagggtctatgtgctgctattgccaagtattgccctaatgcacttgtaatatg

SEQ ID NO: 49471 - DNA, 236 bp, Gossypium hirsutum
  Clone ID: LIB3197-004-P1-M1-F10
tcttatatctctgacaccttataacattgggggggggttataactggaggggtgtgggcctcatcctccacctttaaatacttctccaaattatatcataatagacgatttacaaagactttatcttcattaccttaataaattcttttatcattacctaaaccttcattataacctctcccgacatttaaattatttatataatattctttttaatcttcaacccatttttcata

SEQ ID NO: 49472 - DNA, 391 bp, Gossypium hirsutum
  Clone ID: LIB3197-004-P1-M1-F11
gcttttccaatctgttgaagaacccagagccagagtacgagcagctgatgttttatggcaaaaacttgaattcacttgatacacagttcaaaactaaggagaacaaagttgagggctgtgtttctcaggtttgggtgagggcttatctcgataaagatacgaatgtcgtttaccaagctgattctgattctgttttaactaaaggactcgctgctttgcttgttaatggattgtctggaaggcctgtccaagaagttttgagggtttctcctgattttgcagtgctccttgggctgcaacagagcttgacaccttcaaagaataatgggttcttgaacatgttgaagttgatgcaaaggaaagcacttgaactgcttattgaagctgaaaa

SEQ ID NO: 49473 - DNA, 239 bp, Gossypium hirsutum
  unsure (1)..(239): unsure at all n locations; Clone ID: LIB3197-004-P1-M1-F12
tcgttttttccaatctgttgaaaaacccagagccgagtactatcagctgaggggttatggcaaaaactttaattcactttatacacanttcaaaactaangataacaaatttgatggctttgtttctcatgtttgggtgaaggcttatctccataaagatactaatgtcgattaccaagctcattctcattatgatttaactaatttactcactacttttcttattaatttattgtctg

SEQ ID NO: 49474 - DNA, 440 bp, Gossypium hirsutum
  unsure (1)..(440): unsure at all n locations; Clone ID: LIB3197-004-P1-M1-F2
gtggagagccttttttttgtgtagcgattctgagttagtcttttctttaagctgacagcttctctccagagttttataatgggtaaggagaaggttcacatcaaccttgttgtcattggccatgtcgactctggcaagtcgaccactactggtcatttgatctacaagctaggtggtattgacaagcgtgtgattgagaggttcgagaaggaggctgctgaaatgaacaaaaggtcattcaagtatgcttgggtgcttgacaagcttaaggctgagcgtgaacgtggtatcaccattgatattgccctgtggaagtttgagaccaccaaatactattgcaccgttattgatgcacctggacaccgtgactttatcaagaacatgattaccggtacctcacangctgactgtgctngtctcattattgactcacccactgg

SEQ ID NO: 49475 - DNA, 237 bp, Gossypium hirsutum
  unsure (1)..(237): unsure at all n locations; Clone ID: LIB3197-004-P1-M1-F3
ggccggccggaatcccgntcgacccaccgtccgtttattcctcctacggtacaatctgaggggcttttatagctgcgcgtcttcanattctataatcacaaggagacagtacatcaaccttgtgccattgcctgccactcttcaagtcaccactactgtcattcatctacaactggtgtattacaagctgcattgaaggctcaaagcagctctcaatgaacaaaagtcatcaatctc

SEQ ID NO: 49476 - DNA, 345 bp, Gossypium hirsutum
  Clone ID: LIB3197-004-P1-M1-F4
gatatccctatttgctagggttttggtgcaggggaggggccccattgagctgtgagtgcaccctcataatcggtgatccctatctccataaagtcaaggctcgaggcttattctcacttaaaggtccccatcttaaactccgatttcaacggaggagacaaagaccccgatggtgcatccccgaaagtaaacctctctcctatctctttttattctcatacgaaaagatttggtgcaaaagcgacaataaaaataaatcaaaacatgagaaaatgaaagctgcaatcaccttctatttttatggttgcttttggattcttgatttcagatgcctatcgtaatttt

SEQ ID NO: 49477 - DNA, 156 bp, Gossypium hirsutum
  Clone ID: LIB3197-004-P1-M1-F6
gttctggctcatgtacagaagagttgtgtatcgttgtgatctgcagaccaacgcgattcaattccaaatggctttatatggaaatttttatgtaaaatgaattgttaacatttaaaaatatatcaggatcctgggagatgatctggtccttgttcc

SEQ ID NO: 49478 - DNA, 367 bp, Gossypium hirsutum
  unsure (1)..(367): unsure at all n locations; Clone ID: LIB3197-004-P1-M1-F8
tcgtttatactgtgacaccttataacattnaggggttgaaataactggtggaatgtgggcctcatcctccacacttaaaaactggtgcaaagtatatcataagatatgatggacaaagactttatcttcgttacctgaacaaaagcatttatcatcacctatagcttggttataaggtggagcgacatttaaatgatggagattatgttctttttaatcgtcaacccagtctccataaaatgtcaatcatgggccatagaatcctaattatgccatactctacctttcgcctaaatttgtcttttacttcaccatacaattctgattttgatcgtgatgaaatgaatatgcattttcctcaatcatt

SEQ ID NO: 49479 - DNA, 333 bp, Gossypium hirsutum
  Clone ID: LIB3197-004-P1-M1-F9
tcgttttactgtgacaccttataacattaaaggggtgaaatatcttatggggtatgggcctcatcctacaccattaaatactctttcaaaatatatcatattatatgattgacaaacactttatcttcgttaccttaataaaatctttcttcatcacctaaatctacattataattcttgacccactattaaatgatgcatattattttcctttttaatcttcaacccaatctccataaaatttcaattattatctatataattccaattattccatactctactttttccctaaatctttacttttacttcaccatacaattcctcattatt

SEQ ID NO: 49480 - DNA, 430 bp, Gossypium hirsutum
  Clone ID: LIB3197-004-P1-M1-G10
tgtactcgtggggttataaccctataacgtgtgtaacatgaacagactctggagagtactatacttaatacatgggcagtacgtacaacgaaacctgatgctacaaaaattgatagagtttcagggctggttactgggctccgagtacttaatgctctatctgactgggcacttgttgagatgcttcctaataaagaggcttttgcctcttgccaaactgaggatagtcaggcaactgctccctcctcgacttttgatggggaagaaatgtctactcaaaactggtttgggaatttataatatgaactgttaattgatcctcgtcattagatcctgtgcataacaatgaagaaacacatgatcaagtgctgaaaaccagattggaagaaaaagttgaacaccttgaggaaggacctatgatagaaaaact

SEQ ID NO: 49481 - DNA, 336 bp, Gossypium hirsutum
  Clone ID: LIB3197-004-P1-M1-G11
atgcggggactgcgcgcggactgactgggccaggagctggtcgccggcgcgtgactgcccgaagacgcggacggggcgctactgacgattggcgccgcgctggccaaacatcatctgttgatgtggattacaatgcttgttgtcgatgagatctatcttcaaatatttattgatctgtcacaatggcctttatatagaggtctcactgatttatgtattactgctctactactaaaacatatattgcaacggactttcttgtgtgacatctatggctacacaatagtactgtacatctatgctttggtaatttcatagaaacacacaggagctgta

SEQ ID NO: 49482 - DNA, 202 bp, Gossypium hirsutum
  Clone ID: LIB3197-004-P1-M1-G12
tcgttttttttgaaccataccctactctcgggtggggttcaatttgtcaagggggacgtgtaccatacttcatactccgccactccactcaaataatcttattccgatacatcttgcttgatatacccttattctaactgtacaacctatccttgattctatattccccacggttcttccctttaaatctcccataattgaa

SEQ ID NO: 49483 - DNA, 165 bp, Gossypium hirsutum
  Clone ID: LIB3197-004-P1-M1-G2
aaaatacgtttcctactatttaaatctgatggtaaaaataagttgaaaagggtcatgaggctagtttgtggggatttctagtgcaagctcttatacaaaaagtttagcctaagcttttacccatttaatgtaacaagtcattacaaaatgaaatattatattatt

SEQ ID NO: 49484 - DNA, 341 bp, Gossypium hirsutum
  Clone ID: LIB3197-004-P1-M1-G4
atcgcagtgtggagtgtacagggagcgtccaagccatgatttccgcttttggagtgcgtccatgatggttggggtgtttgtgtgctggtgggtgtgccaaagaaagacgatgcattcaaaactcatccaatgaatctactaagtgagaggacccttaagggtgctttttatggcaactataaaccacgcactgatattcctatggttgtcgacaaatatttgaacaaggagctggggctggatatggacaagttcatcacacactctgtgccttttgccgatataaacaaggcattcgactacatgcttccaggtataagtctgagaagcatgattcattt

SEQ ID NO: 49485 - DNA, 456 bp, Gossypium hirsutum
  Clone ID: LIB3197-004-P1-M1-G5
attcgtggtgagaagctgtcaaggagtagaaattggtatgcctagaagcagatgttaaaagcagtttctcttcagaacatcttttttcataccacttgataagcatcttgaaacaccatggctgtagctgcagtaaaatgggtgatgtcaaagagaactatcttgaaacatttatttccaatccaaaatggagctttatattgtgtttgtcataaatctacgtattctcctctaccagatgactataattgcaacgtagagcttgctctgacttctgatggcaggacaatagtatgctaccacccttctgtggacattccatatgaacacacaaaacctgtccctcggccagatcctgtgcataacaatgaagaaacacatgatcaagtgctgaaaaccagattggaagaaaaagttgaacaccttgaggaaggacctatgatagaaaaacttagc

SEQ ID NO: 49486 - DNA, 412 bp, Gossypium hirsutum
  Clone ID: LIB3197-004-P1-M1-G6
ctgtatcttagttcttgattaattagccaatcgcaggagccatgtctctcctagggatctcatcaacctcaacctcggcgacgccactgaaaagatcatagccgaatacatatggatcggtggatctggaatggatctgagaagcaaagcaaggactttgcctggaccagtggcggacccttcaaaactcccgaagtggaactacgatggttccagtaccaatcaagcacctggagatgacagtgaggtcattctttatcctcaagctatattcaaggatccatttagaaaaggaaacaacatcttggtgatgtgcgatgcttacacaccagccggcgaacccattcctaccaacaagagatttaatgcggccaaaatctttagccaccctgatgttgttgcttgagagcct

SEQ ID NO: 49487 - DNA, 426 bp, Gossypium hirsutum
  unsure (1)..(426): unsure at all n locations; Clone ID: LIB3197-004-P1-M1-G7
cccacgcgtccgagcaatgggacctactgttggccaaatgtatcctcctggcgctccacattttggacagcaactcttctatggtcaaggccctcctgctatgatttcaccccaacctggatttggatatcagcagcaactagttcctgggatgatgccaaactttttcatgccaatgcttcagcctgggcagcaaaatcagcgccaaggaggcagacgatccggagggggcccaatgcaacaaacacatcaaccacttcccttcatgcagccacagatgattcctaagggccatggctatcgttatcccccaggtcgcaacatgcccgatgttcctggacgtgtgcttcctgttccttacaatgtangaggaatgccattccgagatgctgcattttcacaacccatggcaactggagctctcgc

SEQ ID NO: 49488 - DNA, 294 bp, Gossypium hirsutum
  Clone ID: LIB3197-004-P1-M1-G8
atcgccggggctgtgggaataagatggcggggaagaagaatgttctgtcggctcttgcagtttacgcggaagagtcatagcccgagtctgatggcgagactggaatcgaggcgatgggcagcgcggctgaggagaaaggcggattggtatctgatgcctatggggaggatgacttttctcgtctagggggtgacgaagatggctatgaaaaaaaagaggatgagaacagtggacagtctgaagatgacgattcagagactgaaaaacctgaggcttattacccaaacgagaagc

SEQ ID NO: 49489 - DNA, 382 bp, Gossypium hirsutum
  unsure (1)..(382): unsure at all n locations; Clone ID: LIB3197-004-P1-M1-G9
tattctttgaaggataccgtgctggaacttgagtttcaaggtgtcaaaaggcagtgcaccatgcttcaaacatggcctgtacgtacacctagacctgttgcgacaaaacttgctgcagatacccctctgcttactggccagcgtgttcttgatgctctattcccctcggttcttggtggaacttgtgctattcctggtgcttttggctgtggcaaaactgtgattagtcaagctctttctaagtactcgaattctgatgctgttgtctatgttgggtgtggggagcgtggaaatgaaatggctgangttcttatggatttccctcaattgacaatgacattgnctgatggtcgtgaaaaatctgtcatgaagcgcacaacac

SEQ ID NO: 49490 - DNA, 240 bp, Gossypium hirsutum
  Clone ID: LIB3197-004-P1-M1-H1
acccttccgtggtttttactttgtcgcccgtggccaaaacgggaagaccaaaaaaacttgttcgcaggtccattatttttaccttaaacttattcgtaaactttaaccattttttgttaaaaagacttgccacaaaatcaattcttttaattttaaacctctttttattaaccaaatgaacaaaccttctttttttttattcaaaattattggatttattaaaggccaggaagattaaaa

SEQ ID NO: 49491 - DNA, 286 bp, Gossypium hirsutum
  Clone ID: LIB3197-004-P1-M1-H10
agcatcatgagcttaaggtgaaggactcaaagacccttctctttggtgaaaagcgggtcacagttttcggtatcagaaaccctgaggaaatcccatgggctgaggctggagctgagtatgttgttgagtctactggtgtttttactgacaaggacaaggctgctgctcacttgaagggtggcgcgaagaaggttatcatttctgctcccagtaaggatgctcccatgtttgttgtgggtgtcaatgagaaggaatataagcctgaccttaacattgtctccaatgc

SEQ ID NO: 49492 - DNA, 182 bp, Gossypium hirsutum
  Clone ID: LIB3197-004-P1-M1-H11
atcataatgaacacaaggtaccggactcaacgggcctcctttttctagaaaagcgcggacacacattccggcctcatactccctcaccaaatgcaaaattctacagctccatctcaatgtaccaatctatatacatcagatgtaacttacctgcacaaggctcttgctcactcccacaggga

SEQ ID NO: 49493 - DNA, 91 bp, Gossypium hirsutum
  Clone ID: LIB3197-004-P1-M1-H12
tatcaccatgagcacaatatacctgactcgccggcgcccctctatctagtacggccggacacacataccgtcctctcccacccccaccaaa

SEQ ID NO: 49494 - DNA, 337 bp, Gossypium hirsutum
  Clone ID: LIB3197-004-P1-M1-H2
cggcctctctgcttcatctatcttttatctaatagctcaagaccagaaaggatatcgaacaatggtgaagatctgttgcatcggagccgggtatgttggtgggccaacaatggctgtcattgcactaaaatgcccagaaattcaagtagctgttgtggatatttcagtgccaagaattagtgcctggaatagtgatactctccccatatacgagccagggctcgacgaggtggtgaagaaatgcagaggaaagaaccttttgtttagcagtgatgtggagaagtatgtttctgaggctgatatagtgtttgtttcggttaacacacccaccaaaact

SEQ ID NO: 49495 - DNA, 394 bp, Gossypium hirsutum
  Clone ID: LIB3197-004-P1-M1-H3
ctcaacgctctccttctgtttctggtcaagccaatctcaaaagactccccttttagctcacagctcctctcttgagtactataatgggtaaggagaaggttcacatcaacattgtggtcattggccatgtcgactctgggaagtctacaaccactggtcatttgatctacaagcttggtggtattgacaagcgtgtgattgagaggtttgagaaggaggctgctgagatgaacaaaaggtcatttaagtatgcatgggtgcttgacaagcttaaagccgagcgtgaacgtggtattaccatcgatattgccctctggaagtttgagactaccaaatactactgtactgtcattgatgcccctggacatcgagacttcatcaaggacatgattac

SEQ ID NO: 49496 - DNA, 316 bp, Gossypium hirsutum
  unsure (1)..(316): unsure at all n locations; Clone ID: LIB3197-004-P1-M1-H9
cacgccgtcctgatctactagtggaaaccgagtnntaccggtgttgccatgtttnngcgttattcttaattcgaagaggaaaggcatnccggtcccnctctcctgatccccaccgcaggatgagattcgacaaaacccttttcaatgagaccaagctagatctatctagatggaatgtatctgccagtggtgctcgcccgaacccacagggatcgtttagatatggttcgattaatgtgactgaagtttacgtcttgagaaacaagccaccagagactattgatgggaaaagacgagcgacactcaatgggatatc

SEQ ID NO: 49497 - DNA, 441 bp, Gossypium hirsutum
  Clone ID: LIB3197-005-P1-M1-A1
ttctctctctctgggtctcaaattccggggctgcgtgcccctaatacgaaaccgagcaaaacccaactctgatttactcctaattggtactggccgggtattttccatcactttcctgggaaaaaaaagcataaaaggaaaaagtttcaggagaaatgtactcagctattcggtcgttaccgttgaatggaagtgtaggagattatcaagggtcgtttgatggaaccaacttgcctagcgatgcttgtttggttttaacaacggatcccaagcctcgactccgttggacagctgagctccatgaacgtttcgtcgatgctgttactcaacttggtggccctgacaaagcaaccccaaagactattatgagaacaatgggagtaaaaggccttaccctctatcacttaaaatcacaccttcagaaataccggctggggaaac

SEQ ID NO: 49498 - DNA, 378 bp, Gossypium hirsutum
  Clone ID: LIB3197-005-P1-M1-A10
tcttttagaccttcgctcttttaatctccacgggcgatcttcaaacaggagggagagtggcttcattatttaatttgcagagaatctgatgttgatgttaatggatgacccaaatgatagggatagaaaattcaaataacacctttacactattaaggatcgttgctcaaaaaccaacgagatgtttatttatccactgcagccttattggttctggacattttatccccacattactcagctccgttgatatcctcaaattaaccaagtccccctccgctaggatccttattatcaccttcttcaagacatttatgcctcctccaccaaactaaactgagaatccattaacatattgtttagaactttatctacaaa

SEQ ID NO: 49499 - DNA, 348 bp, Gossypium hirsutum
  Clone ID: LIB3197-005-P1-M1-A11
caaatttccaaacactagttttcttttactgcattttgctaagacaagccgagaaacaaagtgaaatattgctgagagtttgtggagatgagtgccttgagtgagggtcttacccaaattgtgatccctttagcttccttggtgggcattggttttgctttgcttcaatggtttttggtctctagggtgaagctattatcacaggattcaagcaatggatataaacaaaaactgattgaatctgatgaagaagaagagggtattaacaatcttgagatttccatcaagtgtactgagattcaacatgccatttctgttggtgcaacctctttcctctttactgaatac

SEQ ID NO: 49500 - DNA, 400 bp, Gossypium hirsutum
  Clone ID: LIB3197-005-P1-M1-A12
gaccggccaccggaaccgccgtctaccgctgttctccgtcttggggcgcccctagcaaaaatttttatcccaatccatcaaggggatcctgtttccttctcttttcacattacctagataaattttccccaaacaaaaaccctaagaagccatcgatctagattgaaaaattggtactgccacttcctcaagtctacgtttccttttggaaatcatctcctagctgctaaaccttcttggattttctggtttgggattttctttgatcgaggttgggattgaaaattactggctgaagtttattatttttttttggtggtggcgacggaaattgcttgccgttgattctgtaggtattaacagcaactatgtcagggaattctagttgcagtgtctacat

SEQ ID NO: 49501 - DNA, 326 bp, Gossypium hirsutum
  unsure (1)..(326): unsure at all n locations; Clone ID: LIB3197-005-P1-M1-A2
cttggttcctgtagatcttgttattgatcattcagttcangttgatgtggcaagatcggaaaatgcaatgcaagcaaacatggaacgtgaattccaacggaacaaagaaagatttgctttcctcaagtggggttctaatgcatttgataacatgcttgttgtcccccccggatcaagaatcgtacatcaagtcaatttaaagtatcttggaagagtcgctttcaacacaaatggcgtgctttaccctgatagcgttggttgaacagattctcatacaactatcattgatagtttgggtgttgctagctaacgagcttggggggtag

SEQ ID NO: 49502 - DNA, 276 bp, Gossypium hirsutum
  Clone ID: LIB3197-005-P1-M1-A3
ctcgtatcccaagcacgtaaccttaaacccgaggactacacggtttttactgggtgtcggcgattgtcgtaaaagggttgatccaccgatgcccgacagttacttcagaaacttgattcaagccatcttcaccgccacagcggccgggttgctattggaaaacccaccgtcattcagagcttcagcgatacaaaaagctatagaatcccacgacgctaaagccatcgatgaacgtaacaaggcatgggaagcagcgccgaagattttccagttcaa

SEQ ID NO: 49503 - DNA, 424 bp, Gossypium hirsutum
  Clone ID: LIB3197-005-P1-M1-A4
ccaaagtaccctttacattttccctttatttcctttgccgcccctagggttttattacattccccacatggcttctgcagatgtcgagtaccagtgcttcgtcggaggtctcgcatggaccatcaacgaccgtgctctcgaagaagccttcagtgcttacggcgagatcgtcgattcgaagatcattaacgatcgtgagactggaagatccagaggctttggcttcgttactttccgtgatgagaaatctatgaaagatgctattgaaggaatgaacggtcggagtctcgatggaaggaatataaccgtcaacgaagcacaatctcgccgaaacggcggcggcggtggtggtggaggaattggaggaaacggtgggtacaaccgtggaggcggtggatatggtggtcgccgtgaaggtggatat

SEQ ID NO: 49504 - DNA, 326 bp, Gossypium hirsutum
  Clone ID: LIB3197-005-P1-M1-A5
tggcctgagtcaggtgtggggtctctcttcctggagcgtttttcggtgacttttggaagaagtcgaagcttggtttcactggctatccttcacctcaggtttctacgtctgttgtagagccttacaacagtgtgctgtccacacattcactccttgagcacactgatgtttctgtgcttctcgacaatgaagcgatatatgacatctgcaggcgttcccttgacattgaacggcccacttataccaatcttaaccgcctcgtctctcaggttatatcatctcttaccgcctctttgagggttgatggagccctgaatgtggatgtg

SEQ ID NO: 49505 - DNA, 279 bp, Gossypium hirsutum
  Clone ID: LIB3197-005-P1-M1-A6
atctgttctctaacacacactaattatctttcactgcgttcaacttatacaggccgtcgaggcctattaaaatttttcctagattatgtcttgattctcttctccttgagcgtctctcttataactatatacataaatccaaccttagtttcacatgtctttccttcacctcaagtttttacgtcttgttgtagatccttttcatcattgttctttcccacactttaactcctttatcacactgattttcctgtacttctcgacaattaatcaatttat

SEQ ID NO: 49506 - DNA, 400 bp, Gossypium hirsutum
  Clone ID: LIB3197-005-P1-M1-A7
cgtactttgcctaagcagaataaaaaggggggtctcacggggtggggggggggggtcctacactcttcaaaatcttaaaccctgccccaagactctcttccttcaaataccccccccccaaaacaaaaaaaaatggcgactgtagctacaaccaccacatcgacggcggcgacaactgaaactttcaagccctacactcttgcccaaaccctagccgtgcataaaaacgccctctcatccgtcaaattcttcttcgacgggaggcttcttgccttcttcttcggcgacaaaacccttcgtacctattctttcttccccaccgctttcactctgactcctatccatgaatactccgggcacgaccaaagcgtcttcgacgtgggcttctcctcccactccc

SEQ ID NO: 49507 - DNA, 333 bp, Gossypium hirsutum
  Clone ID: LIB3197-005-P1-M1-A8
gagaaagggacgtcactctggatatggtaagcgcaagggtacaagggaggcaaggttgcccacaaagatcttgtggatgagaaggatgcgtgtacttagacgcctactccgcaagtacagggaatcaaagaagattgacaagcacatgtaccatgacatgtacatgaaagtcaagggtaatgtgtttaagaacaagagagtcctcatggagagcatccacaaatccaaggctgagaaggccagagaaaagacattggctgaccagtttgaagctaagagggctaagaataaggcaagcagggaaaggaaacatgctaggagggaagagcgatt

SEQ ID NO: 49508 - DNA, 411 bp, Gossypium hirsutum
  Clone ID: LIB3197-005-P1-M1-A9
cccacgcgtccgattgtgaacaaggatttatatgatagaagagaattatgtttgtttctttgttcatttacagggtggatttcgtaagaaaatgatgaagtttctttccaaagttgttcggttttttataaaatgcatgcattgtgttctatcggttggtccaatcccttcccacatcggcttcgtgatggacggcaatagaagatacgcaaggcaaaataagctgaaacaagtggccggccatgaagctagttacttttctctcatgtccatgcttatttactgctatggactggggatcaaatatatgacggcctacgctttcagcatcgataatttcatgtgcaggcccgaagaagttcaatccatcatggatctcatgaccgagaagtttgagctcttgtgtcgaaa

SEQ ID NO: 49509 - DNA, 270 bp, Gossypium hirsutum
  Clone ID: LIB3197-005-P1-M1-B1
gggcaagggatctcgatttcaatctcgttctctccggcagcaccgtctacttggttccggtgagatctcgacgttgtatccgatctcgacccgttccatagcatctcactgaactagatccgattaaccatggctccagtttcagctctggccaaatacaagctggttttcttgggggatcaatctgttgggaagaccagtatcatcactcgcttcatgtacgataaattcgataacacctaccaggctaccattggaattgacttttta

SEQ ID NO: 49510 - DNA, 220 bp, Gossypium hirsutum
  unsure (1)..(220): unsure at all n locations; Clone ID: LIB3197-005-P1-M1-B10
tcttcttcatctcttcatattggttntttgggggancactccacggcggcgagggccggtgaatttagttaatccctcacacaaattctctctctaaatcttaaccaataatgtctccaaaaaagactaccctttttgcccatttactctccttattcaacaaatacggcatcacattccaaaatatattcgctttttttatattcttgcttttttcatt

SEQ ID NO: 49511 - DNA, 463 bp, Gossypium hirsutum
  unsure (1)..(463): unsure at all n locations; Clone ID: LIB3197-005-P1-M1-B11
ctcatggcaaaactgttactcaggttaccctagcacatttgaaggagaagccagctccatcaactccgacgtcttcatcgtccagctacagtgccagcagtggggtcagatcagcagcagcaaggtggctaggtgctgggaacgggagccgcacgcttggatttgctggggggaatggtgggagtaaaagtattagtagtactagtaggattgggtcattgggtgcttcaagttctagtaattcaatcactaatatgaattttgatgggaaagggacttatttaatctttaacgttggtgatgctatctttataagtgatttgaattctcaggacaaggatccaataaagtctatcaatttcagtaattcgaaccctatctgccacgcatttgatcaaaatgccaaagatggccatgatttgcttatgggggtgaaatctgtgatgtntactctgtgtcactg

SEQ ID NO: 49512 - DNA, 468 bp, Gossypium hirsutum
  unsure (1)..(468): unsure at all n locations; Clone ID: LIB3197-005-P1-M1-B12
ggcaagtcagagaatgacatgttgcaatgtttcattgaatctaagtataaagatggtcgcccaactaccgaggctgaagtaactggcttactgattgctgcgctctttgccggacagcataccagttctatcacctctacttggactggtgcctatctccttcgtcacaaggagttcctatctgctgtgattgaggagcagaagcaaataatgcaaaagcatggaagcaaggttgatcatgatatcttatctgagatggacaccttgtatcggtgcattaaggaagctctgagacttcaccctccactgattatgcttctacgtagttcacacagtgattttagtgtaaaaacgcgagatgggaaagaatatgacatcccaaagggtcacatcgttgcaacatctncagcatttgccaacaggcttccttacatttacaaggatcctgacacatatgatcctgataga

SEQ ID NO: 49513 - DNA, 393 bp, Gossypium hirsutum
  Clone ID: LIB3197-005-P1-M1-B2
ggatgctacaaccttctatgtgcaggctttgtgcaaacaaatagtagaattgccattggggctgccatttctcctgtctcacaatatgatgctaatcaatatgatattaccatcctcatttggaaggatcctaagctaggaaattggtggatggggtttggtgataataacctggtaggttattggccagcagagctatttactcacctagcagaccatgccaccatggtggaatggggtggtgaagtaatgaactcaagggccaacggcaagcacacgtctacggaaatgggctccggtcactttgctgaagatgggtttggaaaatcgagctatttccggaacttggagcttggtgatgccgataatagcttgagttcggtccatgacata

SEQ ID NO: 49514 - DNA, 390 bp, Gossypium hirsutum
  Clone ID: LIB3197-005-P1-M1-B3
atttctctcaatttcttcacatttcttgattgtatacataaacatcccatctccatcacattctcaagcctattcaatggagtttttaatgaaaatatgtctccttttcctttgtggcctcatttctcactttgttaacatgtttttccagaagagaaatcagcaatgctatatgttgggttatgaatgtttcaaggctgccgatgacaggaagctcgacactgatgcgtgcgtgaaagttgtgttgaggaacaagaatcttggtctggaccaatacaggtttcttttaaaaaccattgttagttctggtcttggtgaagaaacttatggtccaaagaatgttattgatggtagagaagagtttccttcggaaaacgatgcacatgccga

SEQ ID NO: 49515 - DNA, 171 bp, Gossypium hirsutum
  Clone ID: LIB3197-005-P1-M1-B4
ggaacttgaaggtttcagatttcggtctcagcgccgtaactgaacagatccgagccgacggcatgctgcacaccttgtgtgggaccccagcttacgtcgcaccggagatcttgtcaaagaagggttccgatggacctaagggggactggtggtcatgcggggtattccttt

SEQ ID NO: 49516 - DNA, 412 bp, Gossypium hirsutum
  Clone ID: LIB3197-005-P1-M1-B5
atggccaacgccgacctggaggtgaagatccgtgactggcacctgaagcagagcccagctagccctgagcgggactacagcccctaccacaagaccattgaagagctgcgggacaagatcctgaccgccactattgaaaacaaccgggtcatcctggagattgacaatgccaggctggctgcggatgacttcaggctcaagtatgagaacgagctggccctgcgccagagcgtggaggctgacatcaacggcctgcgccgggtgctggatgagctcaccctgtctaagactgacctggagatgcagatcgagagcctgaatgaggagctggcctacatgaagaagaaccacgaggaggagatgaaggaattcagcaaccaggtggtcggccaggtcaacgtggagatggacg

SEQ ID NO: 49517 - DNA, 453 bp, Gossypium hirsutum
  unsure (1)..(453): unsure at all n locations; Clone ID: LIB3197-005-P1-M1-B6
cggactcgtgggctcccctttctcacctaactcttgtttgattgctttctttgtttcaattaaattatctcccaatttttcttttttagttttctttatttttcctctccttgatcgttgttagctgcaaaaaggttacgtcagaaatggattttttcttcagaggcctaaatgaggaattttcatcttcccaaatggacattcttagatgtccatttttgagaaacattaacgagccaactaacttttccttctcgtctgccttgccttttcccatgccggtacgaggagccaaaggtccaatatttgaagatggacccaatttcgacatggcattcaggcttttccatggacgtgacggagtagttccgctatctgtacaatcatccttgcgtattgagaaagctgagaccgaaacagccccaccaatagtcaatccttntgctgcaaagg

SEQ ID NO: 49518 - DNA, 181 bp, Gossypium hirsutum
  Clone ID: LIB3197-005-P1-M1-B8
gagaaagggacgtcactctggatatggtgggcgcaagggtacaggggaggggtggttgcccacatagatcttgtggatgagaaggattcgtgttcttagactcctactcctcaagtacagggaatcaaataatattgacaagctcatgttcctttacatgtacatgattgtcatgggttat

SEQ ID NO: 49519 - DNA, 380 bp, Gossypium hirsutum
  Clone ID: LIB3197-005-P1-M1-B9
cttcttcttctcttcatattggttttttcccttagcactccacgacacagatccgaggagttggggaaaaccctcacacaaattctctctctaaatcttaaccgagaaggtctccaaaaaagactaccctttttgcccatttactctccttattcaacaaattcggcatcacatcccccaaaatagtcgcttttttatctcttgctctcttcatctgcttcaagtcatggctggtgtagcacccgaaggatcccaattcgatgctcgtcaatttgatcagaaaatgagtgatttgctccaaacggatggagatgatgttttcacttcttatgatgaagtttatgacagttttgatgcaatgggacttcaagagaaccttc

SEQ ID NO: 49520 - DNA, 145 bp, Gossypium hirsutum
  Clone ID: LIB3197-005-P1-M1-C1
cccacgcgtccggctatatgttatttatagtagaaactccttgatttacttttattcttgtggttattacaaaggagatttttacacaaggatggtaatggaacggagcgagagcaattgcatgaattgtctcatccatttattt

SEQ ID NO: 49521 - DNA, 336 bp, Gossypium hirsutum
  Clone ID: LIB3197-005-P1-M1-C10
gttaattccataagccccattctgccaggggggggatacaatcgctgtgggggggcaagaaagtcggatcagcctcgatcataggaggttatttttaccggtccaacaccgatccttgtatgtatggaaggtacttgaacgcatattagtatgccggtgcaatatgggcagcaaccgaagaccctgaaaacagtggctacttatcaactaacactattccttttggttgtgcaagagactcccctctagaatgcatcaccgagccatcaagcactattgcagcattgggttacattgactcattcagtcatgacaatagcaaagatactatacttg

SEQ ID NO: 49522 - DNA, 391 bp, Gossypium hirsutum
  unsure (1)..(391): unsure at all n locations; Clone ID: LIB3197-005-P1-M1-C11
agagaagtcagataaagaggatgatgtagaagatgccaaagagaaggagaagaagaagaagaagaaagataataaggataaggagaaaaagaaagaccagaagtgtgataaagaggatgaggaagaataaggacgaagagtgtaaaaatgatgtagcggaaaagctcgaggttagtgaagttggtgagacaacgaataaagaagagaaaaagaaaaacaaggatccagaggtggtagaagaaggtgacaatgttgagacggaagagaagaaaaacaaaaagaaggataagaaaaaagatgaggtagaaaaatttgaaaagaagaagaaaaagaaagacaaggaaaaggaaaaggagcacgaggttgaagaagatgaanggacgggaaagaa

SEQ ID NO: 49523 - DNA, 363 bp, Gossypium hirsutum
  Clone ID: LIB3197-005-P1-M1-C12
atagatgtcagattatgaggaggaagatggagagaccaaagctagggtatggggactagacatcatgttgcttacggttatgcgatcaagaaagaccagtttcgtttaacattggtctacgttgaataaggtcatatcgatataaaagcggattcggcttggcactcggcctgtgactcctgatactcatcttaataggctgagagttggatactcatactgccaatactgcgacaccaaagcatctcatgttgctctgtgcttatgagaaccacatctagtgcataccttcggccgtgtgccaatgcatgaaagcctttctgctaaacatggctgtgaactggtcactgacccccctgaaca

SEQ ID NO: 49524 - DNA, 381 bp, Gossypium hirsutum
  Clone ID: LIB3197-005-P1-M1-C2
gcttctggtcaagccaatatcaaaagacttccgttttagctcacagctcctctcttgagtactataatgggtaaggagaaggttcacatcaacattgtggtcattggccatgtcgactccgggaagtctacaaccactggtcatttgatctacaagcttggtggtattgacaagcgtgtgattgagaggtttgagaaggaggctgctgagatgaacaaaaggtcatttaagtatgcatgggtgcttgacaagcttaaggccgaacgtgaacgtggtattactatcgatattgccctctggaagtttgagactaccaaatactactgcactgtcattgatgcccctggacaccgggacttcatcaagaacatgattactggt

SEQ ID NO: 49525 - DNA, 100 bp, Gossypium hirsutum
  unsure (1)..(100): unsure at all n locations; Clone ID: LIB3197-005-P1-M1-C3
gcggattcctctggtgatgtttcacaatctgtcatactttccactgtagagtccagaatgaggcanaaacaagaagcacagcagtctcatggaaggaata

SEQ ID NO: 49526 - DNA, 462 bp, Gossypium hirsutum
  Clone ID: LIB3197-005-P1-M1-C4
gcattctccaaatttctaatttcaaggacgattcgagccctattgcatgggattgctctgcgtgggtacgtacatacgcattgtttttggaagaaagactcgagtgctatagtattctgaagtatgacatagagccgagcgtctcccgagacctgtcctggggcaggataaggattacagtagaaccacagagttggacagcgaagaattgttagagcaactacctgctctgcagcaattgctttatcgtctcattggttgccggccagaaggtgctgctgtagcgaactatgtcatacaatatgctttggctctggtattgaaggagagcttcaaaatatattgtgctatcaatggtggaatcatcaatcttgtggacaagttttttgaaatgccgagacatgaagctgtcaaagctcttgatatatacaggcgtagccgtcagcatgttatgatatatgc

SEQ ID NO: 49527 - DNA, 255 bp, Gossypium hirsutum
  Clone ID: LIB3197-005-P1-M1-C7
gagaactatatcctctttctaaaaataaaacaaaatattaattaggatatatggcaggtgattcagggaagaaggaagagatgtcaaaggtgaaaatcatcagcacaagtcatgtgaagcctggaaagatgataggaagaaaagaatgtcaattggttacttttgatctcccatatttggcattccattataaccagaagctgttgttttacaagtgtggggagtttgaggagaaggtggaaaatcttatggatg

SEQ ID NO: 49528 - DNA, 144 bp, Gossypium hirsutum
  Clone ID: LIB3197-005-P1-M1-C9
tcttcaaatgaggcctttcctgatgacgtcggaaaagctaaaaatggaaggggggcgccattgaatgatattgaaaagtttatgaggcaattcgctgcttaacctgcactttcccaaccacaagctcattttgacaatatattg

SEQ ID NO: 49529 - DNA, 215 bp, Gossypium hirsutum
  Clone ID: LIB3197-005-P1-M1-D1
cttgagtgttgaaggtattgattctttaacttcaaaatatcgtgaagttgctgagcaattcaaaggacagggaattggtttccttttgggtgatcttgaggctagtcaagctgccatccagtattttggagttcaagaaagccaagtacccctaatcatcattcagaataatgataggaagaagtatttgaaaccaaatttgcaggctaatgaca

SEQ ID NO: 49530 - DNA, 456 bp, Gossypium hirsutum
  Clone ID: LIB3197-005-P1-M1-D10
atattccttgaaagaaaataaaataatctgagattaaaaaaaaaaactgaagaagcttacggcctttctggtggtagtacagttgaaagacactttcctcttctctagcttcccaaaccttttttctgatcctcagtctttgggtttcttttatcctttgacttctccccatctttttgatgattcgctctgttgttgttggttttggacattgatttatagtaatcatcatatctattgttcatcttcctctgttagatatggaggctatcaagaagcaggctaccaagctcatagagcaagtttccaaacaacagcaagcagtacttaggcatcttgggcattttagtatgaagacgttactgttgatgaagctgatcttcaatgtcatcaaaagctttaagacctgtacagatctacaaaggcagctaaacatttgcagcggaacattgttcg

SEQ ID NO: 49531 - DNA, 467 bp, Gossypium hirsutum
  unsure (1)..(467): unsure at all n locations; Clone ID: LIB3197-005-P1-M1-D11
cttaattggagagcacattgactatgaaggatactcagtgttgcctatggcaatcaggcaagacacaattgtggcaatccgaaagcacaaagaaggggaggctgaaaagcttctaaaaattgctaatgtcaatgataagtatgctacctgtacttatcctgctgatcctaaccaggaaattgacttgaagaatcataaatggggccattatttcatttgtgggtataagggtttttatgaatatgccaagtcaaaaggagtgaatgtaggtaagccagtgggccttgatgtccttgttgatggaacagttcctacaggttctggtctatcaagctctgcagctttagtttgctcagctacaattgctattatggctgcttttggtgttaacttctcaaagaaagaaattgcccaactaacatgtatttgtgaacaacatatnggaacacagtcaggtggaatggacc

SEQ ID NO: 49532 - DNA, 301 bp, Gossypium hirsutum
  Clone ID: LIB3197-005-P1-M1-D12
tctcttaattggagagcacattgactatgagagtgatactcaatgttgcctatggcggtcagccttaacacaattgtggcattccgtaaccacaatgaagggttggctgaaaagctcctaaaaatggctaaggtccatgatatgtgtcctcctgtgcttatcctgctgattctaacccggaaattgacttgaagaatcataaatggggccacaatttcatttgttggtataagggttattatgaatatgccaagtcaaaaggagtgaatgtaagtaaaccattgggccttgataaccatgt

SEQ ID NO: 49533 - DNA, 357 bp, Gossypium hirsutum
  unsure (1)..(357): unsure at all n locations; Clone ID: LIB3197-005-P1-M1-D2
tgattttatccgttttcttggtcgtgaaatttgaataccatagtccatgggattaaaattctgtcatccttatcgtgattcatgaatcttggttataaatggagaagggtgatcaaggaaaagaggattctaaggatcggattagtgaattaactgatgaaattctatttataattctttcctttttgacccttaaagaggcagcaaacatatgctttctttccaggaggttgaaaattttgtggccacacattgttgctttgaactttgatgcttcaaatacattangcgagcttcggaggaatgggcgattaaggaaaaaaaagagaacttggtacataaactgggttaaccacg

SEQ ID NO: 49534 - DNA, 111 bp, Gossypium hirsutum
  Clone ID: LIB3197-005-P1-M1-D3
cttaaagttgaaacgaaaccctcttttgcacgctctttctctctcatattcatcactcgaagcaaaagtaaaagggaaagtaaaaggaggggtttgaggagggtgaaagat

SEQ ID NO: 49535 - DNA, 279 bp, Gossypium hirsutum
  Clone ID: LIB3197-005-P1-M1-D5
gtctttgaggggacaggtcccatgtgaacaggccgtgcacatgtcatagtcaacactaggagacaaagtaagccggtacgacagcggatgcagctcaagctggtaaaggaaatctggttacaatgcctaagccgactcccactttcttaccaaagcgttacggatcgcggattacgtagcaggcacctctaaaatagtcacaaggttcaccaaacacgatgccaaccctgaatacaactcaaccatgaggcagggagcaccgttctgaaaagcagaatg

SEQ ID NO: 49536 - DNA, 460 bp, Gossypium hirsutum
  Clone ID: LIB3197-005-P1-M1-D6
ctctgttcttgcaagtagttaccagttaaaatgggggtttacgactgtccgatgagaacacttcttttgctgctttggaaccagatccagccgctagcattttgaaccctgcatttctcttttaacacatccatcgttcaatgcgcttgttttgatctatagatcttaggttcggagtctctgtgtgtgctttggtgtgggggttttctagtgacaaaaatagaatggggaaacaatcaaagtcaggagggtgtttggggtggttactggcgatagtaatattggctctggttgtgggagccattgtttatgcatttaatcataaaatcgatcacgccaatgataataagccatctcccgttccaagtcctacaggcgctattgacaagaagtatgccgatgctctcaaaatcgcaatgcaattcttttacattaaaaatctggtaagtaagtgaataat

SEQ ID NO: 49537 - DNA, 147 bp, Gossypium hirsutum
  Clone ID: LIB3197-005-P1-M1-D9
gtatttgttcactaccgcatagataagaggaggcaaacaaagttgaactgggcttgcagtataagcgactacgaaaagaaatatgcaagagtgcatgacagcccaaattggtctggcctgaattgccgcgggtaactcaacatgaaa

SEQ ID NO: 49538 - DNA, 393 bp, Gossypium hirsutum
  Clone ID: LIB3197-005-P1-M1-E1
caacccgccacacttgcggtcaacatcactaatcctttcctttcatttgtttgtctctccgaacttaatttttcaaaaccttcgaaaattaataaaatttcaaaaaaaaaaaaaaaacagaggacgaattggagtcaatactcgactgacatggctgcacttcggcctcctagatcggtctcctcccgagacagttctgatggtagcgagaggttggacggtgctggtagctgggacgcccttgaatggaccaaaattgagccggttacaagatctgtttcccatgttaattcggagtttctgcttgaagctgagcgagttatagaggagggccatggagttgttcttggtaatagaaatgaggccggaaacttgttcgttaccaactttcga

SEQ ID NO: 49539 - DNA, 462 bp, Gossypium hirsutum
  Clone ID: LIB3197-005-P1-M1-E10
caagtttaaatattattgttttcccattttgtgattaaacaaaatcaaaatctttaagcaaggaatcagttcaaaggtggtggaaaattatattcgacagtagcttttcctgcaaaggtttgattcttatagataagtttcaatgcccaacaacaagtctaaacccggaccaagccgaatgtctgtttacctttacattcccaatattattgggtatataagaattctgttgaattgctatgcttttgctatatgcttttccagcaaaagtctttttgctgctctgtattttctaagctttgtttgtgatgctgtggatggttggtgtgctcgcaaattcaaccaagcttcaacgtttggagctgtcctggacatggtaacggataggattagcactgcttgtctactggttatactttctcaagtgtataggcctagcttggttttcttgtcattgctagc

SEQ ID NO: 49540 - DNA, 333 bp, Gossypium hirsutum
  Clone ID: LIB3197-005-P1-M1-E11
ataaaaaaagggaaaagaaaatcaaagttatttttctttcaattgagcccttcatttttctctcattttctttcttcccaaacaacaaagtttaaagaaaatgccaacagatacaagcaaacccatgaaattagaacgatacaatagctatattcgtaaagtccatagcacgaagctgttgaatgcttcatctaaatttctatttcgtgttacccttcttatatccttaagtttgaacctggttttccaccattaactaccctccactttcggataatacccacagtgcacctcaccatcaccaccgtcatagctttctttcaacttaacttt

SEQ ID NO: 49541 - DNA, 330 bp, Gossypium hirsutum
  Clone ID: LIB3197-005-P1-M1-E12
attaaaaaagggaaaagaaaatcaaagtgagtgttctttcaatagagccctgcatttttctctcattttctttcttcccaaacaacaaagtttaaagaaaatgccaacagatacaagcaaacccatgaaattagaacgatacaatagctatattcgtaaagtccatagcacgaagctgttgaatgcttcatctaaacttctatttcgtgttacccttcttattgcttcagttttgatcttgtgtttcaccattaaccaccctccactttcggataataccctctgtgcatcttaccatcaccaccgtcttatctttttatcatacttatt

SEQ ID NO: 49542 - DNA, 352 bp, Gossypium hirsutum
  Clone ID: LIB3197-005-P1-M1-E2
ctaggattcaaaatccaagatccgacattcttgtatcgcaatctctgtgacggatcaagccaagctgaaaccagcactgccgaagaaacgctactcttcactacagccgtcaacaccatgcggtggccggcggtgaaaagtggggggctgggggtggttgcgatgacatacgtggcggtagactatttacgcatcctatccccaacgtggcacgagcgtcttcaacccgtactctggtctttactcgccctcgtcgccgtcacgcgcgtccccttttaccgtcactggagcgccgagtttcgagctgccatctctttccttgcttcgatgatatttatgctctcagctcttc

SEQ ID NO: 49543 - DNA, 194 bp, Gossypium hirsutum
  Clone ID: LIB3197-005-P1-M1-E3
cgcttaatagggaaatactttgaggagatcagtcaagatactgtgaaggacggttcaagcacaacttaaaccatcactgccgaataaacgcttctctttactacagtcgtcaacaccatgcggtggccgggggtgaaaagtgtggggttgttggtggtttctattacaatactggcggtagactatttacacat

SEQ ID NO: 49544 - DNA, 398 bp, Gossypium hirsutum
  Clone ID: LIB3197-005-P1-M1-E4
gtcctttgatgcgtacggaatggaaggggaagagattcacgctgctcctaataaccatcctttcgccgtcggcgatgagagctactcgaattacggctcttactccaacttcaccgatgaccagctgtttaccggggacgggggcgaagtggcggtagatgacgtcactacctctgctgatatcttcggattcggatcctctgatccaactcctgcctactcgcaatctccattcgctactgcgattcctgttgagaacggaaatggaaccaatggatttgatcttggaaacgatggcgttttcgcttctgatggaccggtgcttcctcctcctactgagatggagcctgaggaaggcttcgttcttcgcgagtggcggcgtcaaaatgcgattctgc

SEQ ID NO: 49545 - DNA, 454 bp, Gossypium hirsutum
  Clone ID: LIB3197-005-P1-M1-E5
gaaagctcggccgcctgcacgtgcccgtacttactggtcggtcgactcatccggtccttttatgcgtacggaatggaacgggaagagagtcacgctgctcctaataaccatgctttcgccgtcggcgatgagagctactcgaattacggctcttactccaacttcaccgatgaccagctgtttaccggggacgggggcgaagtggcggtagatgacgtcactacctctgctgatatcttcggattcggatcctctgatccaactcctgcctactcgcaatctccattcggtactgcgattcctgttgagaacggaaatggaaccaatggatttgatcttggaaacgatagcatatccccttctgatggaccggtgcttcctcctcctactgagatggagcctgaggaaggcttcgttcttcgcgagtggcggcgtcaaaatgcgattctgctcg

SEQ ID NO: 49546 - DNA, 355 bp, Gossypium hirsutum
  Clone ID: LIB3197-005-P1-M1-E6
gactcacgcgttcgttttaaaaagggaaaagaaaatcaaagtgattgggtctttcaattgagcccttcatttctctctcattttctttcttcccatacaacaattactgatgtaactgccacttcaccgatgaccatctgtttaccgtggacgtgggcgaagtggctgttgatgacgtcacttcctctgcttatttaattagattctgatcctgtgatccaacttctgcctactctcaatctacattctctactgctattcctgttgataacggaaatggtaccaatggattttatcttggatacaatggcatatccactttttgatttgtaccggtgctttcttccttctactg

SEQ ID NO: 49547 - DNA, 54 bp, Gossypium hirsutum
  Clone ID: LIB3197-005-P1-M1-E9
tctgtccttaaaaatcataggactaaaggcgatcaaacctcgtcttcgatgggg

SEQ ID NO: 49548 - DNA, 310 bp, Gossypium hirsutum
  Clone ID: LIB3197-005-P1-M1-F1
tctgaacgtgcgtcaagaaacgccttggatttacctgggtttcgcatcgactgctctgttgctacgtgtatgaataactagtgagcgaaaccgagagagtgcattacagcccacatcagtcaggctgatattcaagtcggtaatgcctgctgggaacactactggcttgatcacggaattcagactgatggccagatgccacgagacatgaccgtcaccagaggtgacgatgctgttaacaccgttttcagtgaaactgctgctaggaagcacgaccctcgtgctgactgatgggatcttgagcctactg

SEQ ID NO: 49549 - DNA, 286 bp, Gossypium hirsutum
  Clone ID: LIB3197-005-P1-M1-F10
ctcaactaaacttataacgttcgatcgtttaacgcaaacccatttttaagtgagggaaaggtttcagttcagagtcataagcaacatcaatggctccttcaactctgacggctcttgcggaagagaaaaccttgcaggcatgcttcgttcgtgatgaagatgagcgtcctaaggttgcttacaaccaattcagtaatgatatccctgtcatctctcttgctggtatcgatgatgttgatggcaagaggggtgagatatgcatgatgattgttgaggcttgtgagga

SEQ ID NO: 49550 - DNA, 290 bp, Gossypium hirsutum
  Clone ID: LIB3197-005-P1-M1-F11
ttctgtctcatccgcatacccgtggatatggttgggcctttccaggggtgtggaggctgttccctcttattcagttcttttattcttttattctcataattattattctaaaatattcctttccgtatttttttactttcttttcatacccatacactgctttttttttttatggttgctttcttcttcacaactactattcttttctatgctctactaaacacgtttgcttttaattgcttatttcaatttctctttttcatccttttttgccatttcctctctatctt

SEQ ID NO: 49551 - DNA, 70 bp, Gossypium hirsutum
  Clone ID: LIB3197-005-P1-M1-F3
aaaaacaaaattacagtgcaccaactgaacgctaacctaaaacacaaaaaagggtggtggtcgattaagg

SEQ ID NO: 49552 - DNA, 465 bp, Gossypium hirsutum
  Clone ID: LIB3197-005-P1-M1-F4
tgtcctgacaagcaagtgtcatggtttccattaaacctcagagtattagactgggaaaatacccacagatttcaatgtacgttgagtgtccggaaactaatgatgagtaatcaaaggttggcttatttgagtatagattctggtagaaagcaacataggagccctattgtctgtaagacatatgccatccatgctggtttggaggaatcctcatctctacagtcagaagatccttttactgaagatgagcatacttccgaagattcaccagagcagcttcttgctaaaccactaagcagtgaagagcagctgaaatccctactggctgactctgagagggcaaagctcaccaaaaaactaagtgaagctaaccagcaaaaccgcttcctaaaacgacagttacatatgaaagaggaagcactagtcaacttcaaaagtgaacttgctgtcatggaactagaaatc

SEQ ID NO: 49553 - DNA, 238 bp, Gossypium hirsutum
  Clone ID: LIB3197-005-P1-M1-F5
gttccttgtgaacggcacttgcacatgggttagtcgatcctaaaagacgggggaagcccgtccgacagcgcgtccagcgcgagcttcgaaagggaatcgggttaaaattcctgaaccgggacgcggcggctgaccgcaaccttagggagtccggagacctccgccggggcctcgggaagaggtatcttttctggttaaccggcttcccacccttgaaaccgcttaacccgaagttggg

SEQ ID NO: 49554 - DNA, 326 bp, Gossypium hirsutum
  Clone ID: LIB3197-005-P1-M1-F6
aaaaataaaaaaaaaaaaaaaaaaaaaaaaaaaaaggaaaaaaaaaaaaaagaggaagaaaaaaaaaaaaaaaaaaaaaaaaaaaaaaaaaaaaaaaaaaaaaaaaaaaaaaataaaaaaaaaaaaaaaaggggggggccgttttaaggaatcaaattttaataccgcgtgcttggaactttataatttttttttagggtacctaaatttaatttaacgggccttttttttaaaacgtgtggattggaaaaaccttgggtttaccaaattaattcgctttgaaaaaaatccccttttggcaaggttgggttaaaaccaaaaaggcc

SEQ ID NO: 49555 - DNA, 378 bp, Gossypium hirsutum
  Clone ID: LIB3197-005-P1-M1-F7
gagcttctaccggctcctgtcatgatttctgcaaatatggaaagaagcatgaatctgaagagatcgctagacatcctttccggaagaggattgtggaaaagctgtgtgatgagccaaatttatttcggagcttagacttagtgcagaggaagcagacatccacaagtgaatccaaatcttttcccaatttccgatctcatacccctgatatgcctgacactatcaagcttcagttgcccacttgctctcctgatggaaataattctaggatacatggtgttcagttgaagaaagaaaagacatcagctgcaaagcttaagtccaaacatccacccaattctcgtagtcgtcacaaaagctctgatgttgtcacgcctg

SEQ ID NO: 49556 - DNA, 376 bp, Gossypium hirsutum
  unsure (1)..(376): unsure at all n locations; Clone ID: LIB3197-005-P1-M1-F8
ggaaaaaagggtgttaaagaccaaaggccaaagccattttttctttcttttggtttctggggagagaccagtttgggcaaagatggtgaagaagtggaaaaaggctttgattttggtgctgtttacagtctgcattctggggtttaagccaagatgtgtcaatggcgaaacagatcaagcagatgcttctgctctaggggttatgtataccagcttanattcaccacagcagctaacaggttggactgctagcaatggtgatccatgtgggcagtcctggaaaggtgttacttgctcgaacaaacgcgtcactgaaattaaactgtcaaatcttggactttccgggtcggtgggttacaagcttcaaagttgacat

SEQ ID NO: 49557 - DNA, 408 bp, Gossypium hirsutum
  Clone ID: LIB3197-005-P1-M1-G1
cccacgcgtccggcaaatcttactaagccccagctcgaactcctctgtcccattaactgtatgagagagaggaaatctgattttcaatttcatcactgcatcttctctttgcttttggcctcaccttcagaaaggtaagtcaagttctttagattgcttgccgctttttgagtttcaagatctatgaaccccagatctgtagagccttgatcttattgctgaattcttgaattttagtagtttgggttcttttgctttttccttaataactagatttagtttattgtaaggtcattttagctcattcaggatgttgggtcgtcctgggttatctagaactggaagctttaggcctgagaatctaggacaaaatgcttgcatatgattggcaatctttgtttcactata

SEQ ID NO: 49558 - DNA, 409 bp, Gossypium hirsutum
  unsure (1)..(409): unsure at all n locations; Clone ID: LIB3197-005-P1-M1-G10
aagcattagcaaccatagccatggcttcctcaccaaaactcttctctatgtctatcctcttcctttttgccctcttctccatgcaaatccatgctagagagtacttcagcaaattcccaagagttaacatcaatgagaaagagacaacaaccagagagcaaaagcacgagaccttcgttccccagaccacccaaaagccagaagaacaagagccaaggttcattcctgaaacccaaaatggttatggcctttacggccacgagtcaggctcaagccggcccagtttcaccaccaaagaaacctatgaaccctatgtcacccctgttagattccaccctgatgagccctataacagcatccccgaatcctncaacaataaagacacttactactacaacaagaatgccta

SEQ ID NO: 49559 - DNA, 457 bp, Gossypium hirsutum
  Clone ID: LIB3197-005-P1-M1-G11
aagaaactgaactgagcgacaagcaaaagaaagagatcgccaaatggttcctcctcaatgctcccgcaggcgaaatccagtacgttgccaaagatttaaaatccgttttgaataatgatgacgtctacgatgaggcggcatcggaagcatttcctgtttataacaaatctcacatgatttgcctcgaaatgcctggtagattcggagatgtgctggttacatcatatggggagcctcagggtaatgagtatctagaccccaagactgcccaagttgctatagttgaccatgtcaaacaggtttgtacagaggttagacctgccactgatgaggaacttcccactccatatgttgaggaataccgatgtgctctggaagcagaaatgctgaagtatgttagtgaagcttatccaaaaggttcttgttcagtgtactgcattaatggaaaagatgtgga

SEQ ID NO: 49560 - DNA, 241 bp, Gossypium hirsutum
  Clone ID: LIB3197-005-P1-M1-G12
gcgctactggcaaccctttgagcacgccttttgggacttctactatgcgcctgacagcgacttatacctccccactgatgacgacagacgcgggcagctgctacaaaaaagcatcgacatggcatccatgcacgcgcaactcgttaaaaacgaccgtgacgtgatgtatcataagactgatttcggaccatccactctgccattggcatgagggaaatggcacaatgacccaaccaacact

SEQ ID NO: 49561 - DNA, 378 bp, Gossypium hirsutum
  Clone ID: LIB3197-005-P1-M1-G3
gaaaaagcaatgaaaaactaaggtgatttcatatttattttttcgtgttctgatttagtttttttttctttgttcctacatatagatttttcacagaaaaataaggagaaaatgacttaccttaatgctggctccttcatgtctttgctggcttcgtcgaattggaacctaaaccaaaatcttgaagcttctgagtggactcgtggtcgaacaaggccagattatgccttcatgcgatgttcatttgccgaatatggggatagatcgacagttgaaagatgccttaagttcggtcgaatgaataaagaggaataagctttaggtttttttattttttatttgcttttaaggggatgagtgttaaatttagggttttct

SEQ ID NO: 49562 - DNA, 428 bp, Gossypium hirsutum
  Clone ID: LIB3197-005-P1-M1-G4
gtgaaagtgaaaatggaggtttacagcagaaggctaatggttctggtgtttgcatgggcactagtaagcatagggtacgcgcaagagtcgaactcgaccactctggttccagcaatactgacttttggtgactcagtggtagatgtgggcaataatgattatctccccaccatcttcagggctaattaccctccttatgggagggacttcgccaaccaaaagcctactggtagagccaattatggctagtcggcctctgacataactgcgctaaactctggagcattctcaccaccaaagaaacctatgaaccctatgtcacccctgttagattccaccctgatgagccctataacagcatccccgaatccttcaacaataaagacacttactactacaacaagaatgcctacgaagtcactaagcag

SEQ ID NO: 49563 - DNA, 444 bp, Gossypium hirsutum
  unsure (1)..(444): unsure at all n locations; Clone ID: LIB3197-005-P1-M1-G5
ctcttttttaatctcttcccttcatttctttcaccatttccattgattttttgaacagtggcagcaacttccttaaccctctcaagattcctctcaccggccgccgccatttcattatccagcaccaccaagctttcctctaaatcccttcctttaaagttctcctccgtttcttccctttccttcaacctccaccgccgccgcgtttcaaaacccatttccttttccaccaaaacaacccaaatctccgccgctatctccgtcggagataagcttcctgacgcaacactttcctacttcgattccgatggtgaactccaaaccacgacgatctcttcccttaccgccggcaaaaaagccgtcatcttcgctgtccccggtgcttttacccccacttgttcccagaaacacctnccctggttcgttgagaaatctggggaactc

SEQ ID NO: 49564 - DNA, 365 bp, Gossypium hirsutum
  Clone ID: LIB3197-005-P1-M1-G6
gggttttcttccgccgttctaaatcacagaaagctttgaagaagaagcttttggaggtgcaaaacatggggccgaagaaaggtggaaaggtggctgtgcccgccaagaagaaacaagagaaggttgtcaatccgttatttgagaagcgtccaaagcagttcggcattggaggggctttacctcctaagaaggatttgcatcgattcgtgaagtggcctaaggttgttcgtattcaaaggaagaagaggatcctcaagcagaggttgaaagttccaccagcattgaaccagttcaccaagactcttgacatgaaccttgcaacaagtctgttcaaggtgctcctcatgtacaggccagaggacaaa

SEQ ID NO: 49565 - DNA, 125 bp, Gossypium hirsutum
  Clone ID: LIB3197-005-P1-M1-G9
gagagacagtgtttccttcagcaaaggggaacatcaatgctgtgccttggtgggatggattatctgaatggggaaagggaagactttctgtgagacccaaaattggtgattccttactttttttg

SEQ ID NO: 49566 - DNA, 232 bp, Gossypium hirsutum
  Clone ID: LIB3197-005-P1-M1-H1
cccacgcgtccgggtgcttttgggaacatgtgtcgtggaggccgtatgtttgcggctactaagatctggcgccgttggcaccggaagatcaatgttaaccagaagaggtacgccgttgcctcggcaatcgccgcttctgctgttccttcactcgtgatggcacgtggtcaccgtatcgagtctgttccggagatgcctctggtcatatcggatgctgcggagagtgtggaaa

SEQ ID NO: 49567 - DNA, 402 bp, Gossypium hirsutum
  Clone ID: LIB3197-005-P1-M1-H10
gcacacattacagtgtgtttgtgactgggaggatcgggagaataaatttcttgaagttgaaggcatactcaggagacagattaaggttcatgctcaatctgctacatcagttattcctagcgtgcagcctttccatgcaatagcctatcctatagatccaatgctcgcactagaaattagtcgtaaatatgcggcacacagctctgttgttgcttcccgttattctcttcctcctttcaactatcctgcacccttccctggtgagaatgggaatcgacgccttagggtgggatatgtgagtagtgactttggcaaccatcccctatctcatctcatgggctcagtgtttggcatgcacaacagagaaaatgttgaggtattttgctatgcattgagtccaaa

SEQ ID NO: 49568 - DNA, 449 bp, Gossypium hirsutum
  unsure (1)..(449): unsure at all n locations; Clone ID: LIB3197-005-P1-M1-H11
cccacgcgtccgcacttactccctccgttcattccatcttcctctcttctaatttttctgccctcttctttctgctttctttttctttctctcaatagagtttttcttttcctctcttccatttttttttaatctgtaaaattccatcgattgttggaaagagcaagagggttcttagagggggaattgaaatctaaatcgaaaatcgaaaatgttgagtgtaaaccgagtgataaaccaggcatgagcttcgatttcaaattgtcgatacctcctaagtcatgacccaaagatttccccttcacctcttcaacatttcgcttcaaaatcatctattcgcttcttcgatatttacaagctngcaagcaaggaaaaaatcgagaaagaacgagccaagactngctatgaatngaatagaggatattttgatgatatttctgagctaaaac

SEQ ID NO: 49569 - DNA, 450 bp, Gossypium hirsutum
  Clone ID: LIB3197-005-P1-M1-H12
ctcacgcgtccgcacttactccctccgttcattccatcttcctctcttctaatttttctgccctcttctttctgctttctttttctttctctcaatagagtttttcttttcctctcttccatttttttttaatctgtaaaattccatcgattgttggaaagagcaagagggttcttagagggggaattgaaatctaaatcgaaaatcgaaaatgttgagtgtaaaccgagtgataaaccaggcatgagcttcgatttcaaattgtcgatacctcctaagtcatgacccatagatttccccttcaccttttcaacatttcgcttcaaaatcatctattcgcttcttcgattttacaagcttgcaagcaaggaaaaaatcgtgaaagaacgagcaagacttgctaatgaattgaatagaggatattttgatgatatttctgagctaaaacaa

SEQ ID NO: 49570 - DNA, 396 bp, Gossypium hirsutum
  unsure (1)..(396): unsure at all n locations; Clone ID: LIB3197-005-P1-M1-H2
cgcaaaccaaagaaaaaagctagcacacctgatttctgtccccggaaacctcaccgcaaaccaaagaaaaaagctagcacacctgaagtagctcagaatgtagccgagaaggacaaggactcggacttagactcagattcaagcgattcaacattcgagttgcctcccattgcttcgctcgagtttctagatgagtggagttcagcagagtctgataagcaatctgcttcgggaaaaaagaagttagagaagaaccatgcttcaagtgaaggttgcagcagtggtaacatgggaaaggctaagaaacagaagaagtaaatgagtagaagatggtgcgggtgcggttgcacgtgtagttgatcagcaagtntatgttctgcctttctcttattttgc

SEQ ID NO: 49571 - DNA, 240 bp, Gossypium hirsutum
  Clone ID: LIB3197-005-P1-M1-H3
agcaaaattaaaaaaattggctaagcctgcaggtgtgattgccctagcattggtggtgggtgttcacgtgagtgaatcagaagacggggtaaattctaatacaaaccatcggttgcgtctgtctgttgtcatgcacctgatccgtgtgaatctatggattggaaacataggggacgctgcacatgttcttcaaaatggcagctcgtagatcacgcacattctatcagttgtgagctctgc

SEQ ID NO: 49572 - DNA, 278 bp, Gossypium hirsutum
  Clone ID: LIB3197-005-P1-M1-H5
ttcacatcgtccgcacttactccctccgttcaggccatctttcaatgtgatggaggcaccgccctcttctttctgctacctttttcttaacacctcataagtctctattagtctttacaacatgactctctaatctatccaattcctaccctataactacaattaccgtaaggccatttaaagctgaacgcgccaccaaatcgaattttgccaagaggatatatattgcaaatgattaaccatgcatgagcttcgatttcggtcaaagagctcatcta

SEQ ID NO: 49573 - DNA, 403 bp, Gossypium hirsutum
  Clone ID: LIB3197-005-P1-M1-H6
ttcttccggccatttgtttgagctagctagctcttactcaaatggcaaccaaaacgatgatgtgggaaatatttaccttctttctgctttctttcactttctgccactccagtttccttggtgctaatggagatgacaatggtggttggcaaactgcccatgccaccttctacggtggtgctgatgctaccggcacaatggggggagcttgtggttatggaaaccggtgcagtcaaagctatggatcgagcacgcatgagcttagcactgaaattgtcaacaacggctagagctgaggtgcctgctactagctccggtgcaacaatgatcctcaaaggaacattaatcgaaccataaccttgacagccaccaacttttgtccccctactattctttatctagt

SEQ ID NO: 49574 - DNA, 348 bp, Gossypium hirsutum
  Clone ID: LIB3197-005-P1-M1-H7
gtctcatttgatccccccttttctgttgctggtactgagagtcccagagccaggtaaaaaaaatgaaggtgatagataagacccagtctttgtcacaggaccaagggaaaggggtttttcctttgaagtcttcccttcaaagaacggagattgagtggaccacctggttgaaagaatggatcgaatggtggcttattatccatctttttgggacattacatggggtgctggtggttccactgcggatctcactttggacattgctaacaagatgcaaaacatgatatgtgtggaaacaatgatgcatctcacttgcaccaacatgcctgttgagaaaattgaccatgc

SEQ ID NO: 49575 - DNA, 325 bp, Gossypium hirsutum
  Clone ID: LIB3197-005-P1-M1-H9
aaaaaaaaaaaaaaagagctaatcagattttctcgccggaatattccttttctattttcaggtgagtgaaacaaaagaagggttaaattctaatacaaaccatcgtttgtgtttgtctgttgtcatgcacctcattcgtgagaatctatttattggaaacataggggatgctgcacaagttcttcaaaatggtagctcggagatcacgcacattctatcagttttgagctctgcgtcaatatcgtttttctctgaatggcgtagtggtatcacaatcccagccgaggaaatcaaaaaggtttttgtaggtgggtcttgtgatgct

SEQ ID NO: 49576 - DNA, 307 bp, Gossypium hirsutum
  Clone ID: LIB3197-006-P1-M1-A1
gtggaaaaagagaaagtaaaacagtccactcagtgcataaatctcttcttttttgggactttctcgaacaagagaggaatctgtgaaattttattaggtttgggtaagatatggcgatgatgtaccaaagaaaattgttgaggagaacctttggggaaggcaaagcaatactcaacttcaattttaaccctgtattttttccctgcacttccttttttaccgttacttccgctgccgctacaccattccacaatgcgccacgtaagcttccaccgttcgattaccagccgaaaccgtccaacggacc

SEQ ID NO: 49577 - DNA, 254 bp, Gossypium hirsutum
  unsure (1)..(254): unsure at all n locations; Clone ID: LIB3197-006-P1-M1-A11
nacggaatggcacangcacaaggagaagacgagccggagagacgggggaagcccgggcgagagcgcaaccagcgcgagcaccgaaagggaaacgggacaaaacacccgaaccgggacgcggcggcagacggcaaacgaagggagcccggagacgncggcgggggccaaaggaagagacaacgaacaaggacaacggacagcccacccgggaaacggcgcaaccggagggaggggacaacgggcggaagagcacc

SEQ ID NO: 49578 - DNA, 448 bp, Gossypium hirsutum
  Clone ID: LIB3197-006-P1-M1-A12
aggcaacctacggctggtcggaggagatggatgggaaagctcatcttttactgttcttgctcagcagtacgtacgcatgaagaagacacatggtgggaaagttgttccaggagtaatggacacagctagcgcaaagcatttgtctcatgcctatgggaccttagcggaacgagtagccaccatagctcagaatgaaacgctgggtaagaggcttgcccatggttacccatatctggaggccgaggttgcatactgtgctcgaaacgagtactgtgaatctgctattgatttcatcgccaggagatctcgccttgctttccttgacaccgatgcagcaggccgtgcattgccacgaattatcgaaatacttgctaaggagcacaattgggaccggtcgaggcagaagcaagaaatgcagaaggctagagaatttttggaaactttcaag

SEQ ID NO: 49579 - DNA, 378 bp, Gossypium hirsutum
  Clone ID: LIB3197-006-P1-M1-A2
ctgacgcgtgggtgcagggagcagagggaaaaaggataaaagcatcgttgtgtgcttgctgcttcttcaactctgtctctccgtctctgaacctccttctttcgttcttttcttattcactattgtaaaagatggccgatgctgaggatattcaacccctcgtctgtgacaatggaactggaatggtgaaggctggttttgctggtgatgatgctcccagggctgtttttcccagtattgttggtcgaccccgacacactggtgtcatggttgggatgggtcagaaggatgcctatgtaggagatgaagcacaatccaaaagaggtattcttactttgaaatatcccattgagcatgggatcctcagcaactgggatg

SEQ ID NO: 49580 - DNA, 334 bp, Gossypium hirsutum
  Clone ID: LIB3197-006-P1-M1-A3
gcgatggtgttggtcttttgggtattgcttgggcttttggtggcatgattttcatgcttgtttactgcaccgccggtatctcaggtggtcacattaacccggcggtgacatttgggttgtttttggctaggaaggtgtcatttataagggcgggggctaacatggtagctcaatgtttgggtgttatttttggtgttgggttagtaaaggctttcatgaaaagtgaatacacctcctttggcgggggtgctaacacagaggcgactggttataacaaagggactgctttgcgagctgagattattgggacattcttgcttgttaacacttgttt

SEQ ID NO: 49581 - DNA, 456 bp, Gossypium hirsutum
  Clone ID: LIB3197-006-P1-M1-A4
cctcagcttaattcagctgaaaatggcaccttcatctctgccacaaacaccgccgtccgccgtggttattgtcctcttcttactcttctccacggcattgctttgtgaatcaaggttaagcttagattactactccaaaacctgtcccagtttcaccaaaatcatgcaagacaccataaccaacaagcaaatcaccagccccacaaccgccgccggtgcactccgtctatttttccacgactgtcttcccaacggttgcgatggttccatcctcatatcttccaccgcattcaacaaagctgaacgtgatgccgacatcaacttatctctccctggagatccatttgacctcattgttcgagctaaaacagcccttgaactcgcctgtcccaacaccgtctcttgctccgacatcctcgccgtcgctactcgtgacttagtcaccatgcttggtgg

SEQ ID NO: 49582 - DNA, 400 bp, Gossypium hirsutum
  Clone ID: LIB3197-006-P1-M1-A5
ctgggataagatctcccaaggaggcttgaaacgtatcgaggagaagtatacatggaagatttactcggagagactattgaccctgaccggagtgtatggattctggaagcatgtttccaaccttgaacgccgtgagagtcgtcgttaccttgagatgttttatgctcttaagtaccgcaagctggctgaatcagttccattggcagaggagtaaatttaagctgttaaataacattgggccggtttttcttggagaataatattctgttttgtaatttcaattggagaagctcttttgtatttcatcttgtcttttccttttccttttttcgccggcattgtttgaacatggggttgtgcgcccgtcaattccagttaaatatggtgacttttgtttttc

SEQ ID NO: 49583 - DNA, 451 bp, Gossypium hirsutum
  Clone ID: LIB3197-006-P1-M1-A6
ccttagcttaattcagctgaaaatggcaccttcatctgtgccacaaacaccgccgggcggggtggttattgtcctcttcttactcttctccacggcattgctttgtgaatcaaggttaagcttagattactactccaaaacctgtcccagtttcaccaaaatcatgcatgacaccataaccaacaagcaaatcaccagccccacaaccgccgccggtgcactccgtctatttttccacgactgtcttcccaacggttgcgatggttccatcctcatatcttccaccgcattcaacaaagctgaacgtgatgccgacatcaacttatctctccctggagatccatttgacctcattgttcgagctaaaacagccctggaactcgcctgtcccaacaccgtctcttgctccgacatcctcgccgtcgctactcgtgacttagtcaccatgctt

SEQ ID NO: 49584 - DNA, 294 bp, Gossypium hirsutum
  Clone ID: LIB3197-006-P1-M1-A9
cccacgcgtccgcaacaatacaccaatatactactcatgattttcaggtgagcaattcaaaattcgccacgtcatcacatagtccctgtttttcaaagtatcgtccttggataaatttatccaaaaagaaaagacttattttatataaaaaagtagaaattaataaaaaaaaaccaaccggctagcacttgctataataaagaaaccagagggagattcaaacagaggaagatgaagatgatgaagagagaaaaaaaaatgaagtctcagatctgtttagctctttggaactct

SEQ ID NO: 49585 - DNA, 377 bp, Gossypium hirsutum
  Clone ID: LIB3197-006-P1-M1-B1
aaaaataaaagcattttctcttcctttttgcagagagaaagataaagaaaaaagagcttttttcaaaaaagattttgggttatgggaaattgagagagaaagagaaagatgaagatcacggcgttattggtgttgaagtgcatgccggacggagccgatccgataatactagccaatgcttgcgatgtgagccattacggtttcttccaaaggtcaagcgttcgggagtttatcgtctttgtttctcgaaccgtcgccaaacgaacccctcccggtcagcgccagtccgtccagcacgaagagtacacggtacattcttacaacagaaatggactttgtgtaactggatttatggatgatcactaccctgttcgaag

SEQ ID NO: 49586 - DNA, 439 bp, Gossypium hirsutum
  Clone ID: LIB3197-006-P1-M1-B10
ttcccccgctgctactgctagggtttctttctcttctctctcgcaactcaccagggttctttggagaaaaaaagaaatgtctcgagtttacgtgggtaaccttgacccacgagtttcggagcgagatcttgaagacgagtttcgtgtctttggagttattcgaagtgtgtgggttgctagaaggccaccaggttacgctttcattgactttgatgatcacagagacgccgaggatgcaattcgtgaattagatggcaagaatggctggagagttgagctttctcataattctagaggcagaggaggacgtggaggcggaggcggaggtggaggtggtcggggacggtcgggtggttctgatttgaagtgctacgagtgtggtgaggctggtcattttgctcgagaatgtcgtacacgtggtggttccggaagacgtcgc

SEQ ID NO: 49587 - DNA, 423 bp, Gossypium hirsutum
  Clone ID: LIB3197-006-P1-M1-B11
cccacgcgtccgattgcttttagttgcctcgatgtcaagtgaatcagaatgggtggggaaaagactcacattaacattgtggtcatcggccacgtcgattctgggaaatcaaccaccactggccacctgatttacaagcttggtggtattgacaagcgtgtgattgaaaggttcgagaaagaagctgctgagatgaacaagaggtcattcaagtatgcttgggtgcttgacaagctcaaggctgagcgtgagcgtggtatcaccattgatattgccttgtggaaatttgagaccaccaaatactactgcactgtgattgatgcacctggacaccgtgactttatcaagaatatgattactggtacgtcacaggctgactgtgctggtttgattattgattccaccactggtggttttgaggct

SEQ ID NO: 49588 - DNA, 452 bp, Gossypium hirsutum
  Clone ID: LIB3197-006-P1-M1-B12
tcgaattatgtctacaacacacttgctagtattcctacttggagtggtgactcggaccgctcccacatttggtacctatgagtcaccaaattatgggaaaccccctactcctgtattcaagcctcccaaggtgaaaccaccaccatatgaacctaagccaccagtgtatgaaccaccaaaaaaggagaagcctgaacctaagccaccggtttatgcacctccaaagaaagagaagcatggacccaaaccaccaatgtatgaaccttcaaagaaggagaagcctgagccaaagccaccagtttatacacctccaaagaaagaggagcctaaacctaaaccaccagtatatgaacctccaaagaaggagaaacctgagccaaaaccaccgatttatacacttccaaagaaagagaaacctgaacccaaaccacccgtatatgaacctccaaaga

SEQ ID NO: 49589 - DNA, 450 bp, Gossypium hirsutum
  Clone ID: LIB3197-006-P1-M1-B2
catttttcaacatcaccttctcaagcgccgccgccggctactcttccgccggcgggaaatatccattcccttttctttcccttccctctcctcccttttattaaaaaaagaagaaaaaaaagtcaccaaaacaaaacaaagtttggttctttaggaaaggtttttttcaaaagcacttgagattttaccatatcatttattatcacaattattttactcgttagggtttgtttgattaataacacgaggagagggaagaaagaagaaaaaaacccaaaaaaaagaaagagaaggaaagagaaaaaagagtttttttggttgggtttttagctgttgttttagggtttacaaagatggcgcatgttcaagttcagggacacagtgggggcgttaacaatggatctggtggagccaataaccaggtttgtaaccctcgctatatgttgggga

SEQ ID NO: 49590 - DNA, 362 bp, Gossypium hirsutum
  Clone ID: LIB3197-006-P1-M1-B3
gggacatcccatgggaaacatacatgacaactaagctgatttcaggaacaggcttgcagctgttaaggcgttatgataatagagctgaaagtgtcagggcacagttgttggatgatgatggtccagcctatgttcaagtgtttgttaacatcttacgggatatctttaaagaagaaacagtggaatatgttctggctttaattgatgaaatgcttacagccaatccgaaacgagccagactatttcatgacaagtctcttgctaatgaagatacttatgaacctttcctaaggttgctgtggaaaggcaactggttcatacaagaaaagagctgcaagatactggccttgatagtaagtgca

SEQ ID NO: 49591 - DNA, 449 bp, Gossypium hirsutum
  Clone ID: LIB3197-006-P1-M1-B4
gtttttgatgattcttttaaccctctttatgattcttcgagttgtcccttcgtcggcggtggcttcgattgccgaaaaaatggcagacctgatcggaattacctcaagtatagatggcagcctaatgactgtgcagtccccagcatgctggtgcttgtgatgaaaaaggaaatccaattatcaaggacttctatggcagcccgcttgccgcaaggtttatatgtctgtagccttgtgtttatatcttctataagattcatttacatcattagtttgctgttatcactattcttttaattttatttgcttgcttctaatcatctattaaatccccgttttttaaattgaaatcttaatgtagtggtaagccttacgacgatatgttagtggctaaatttgaatgtgtctatactggttctggtgatcaaggttcctccaagtttgcattt

SEQ ID NO: 49592 - DNA, 212 bp, Gossypium hirsutum
  Clone ID: LIB3197-006-P1-M1-B5
caacccccataataattctgggaaatatcgcttacgaggcgggggacttccaatccccaaaaaatggcagatcttatccacattactccaagaagcaatcgtactcatatagactgactatttctcattaagatccatcactgttataattacttatatccaaatatcaaggactactatcattatccttctaccataatctccatattaaa

SEQ ID NO: 49593 - DNA, 414 bp, Gossypium hirsutum
  Clone ID: LIB3197-006-P1-M1-B6
cattatagttgaagaatctgctaaaaagaagaataagaagaaacatatgagagaagagaagagaggatttttttttttttacttttatttttttgagaggcaaaaaaaccccaacaatattcccatggatttgacttcaacaacgacgacaactactacggcagccgtcttgtccggacctgttaacgaaaaagagttagctgtcgatcctttcttggttgaggctcttcaaaattctcgtcatcgtctcaccatcttgcggatggaacttgatatccagaggtttgtgcaaaattcatagcagcatcaatttgagttccaacattttcccacttcttatcttcggcttgctgcacatcgtgttgctcaacattatgggctgttaactatggtttatgataatggtttagatgg

SEQ ID NO: 49594 - DNA, 417 bp, Gossypium hirsutum
  Clone ID: LIB3197-006-P1-M1-B7
atcaaatcgtaaaatccgacgaaattgccgtgaaggaagaatgggaaggtggagtcaattcgtggttgcggtgactattctggcggtgggcctcctttcggcatcagccaccgctagaccctgcaagacattcttcgtcgcctcctattctttctcttttgaaaaccctaacgacccttcttcctccaccggattcgtcaccgtcttcaccgagatcggtcaattgaacgtcgtaccaccaagacccaagccctccgatgtcttgagctctctccgtgagcgcagtaaggacatccttagcgtggtcgtcgctcttctcttcggcgtcggtagcggcgctctcacggcggctaccctctacttggtctggaccctcttctcgcaccgtctgatatcatcgtgcttgttgcagatgat

SEQ ID NO: 49595 - DNA, 238 bp, Gossypium hirsutum
  unsure (1)..(238): unsure at all n locations; Clone ID: LIB3197-006-P1-M1-B9
cggacgcgtgggtttggtttctctttatgtttcctctctaaatctctgcgggatgagcgatcatgtctcttttaatctccctactcatgttcttagccatgactggccattcaagtgctacttattgcttatgtagagatgggttangggatcaagctcttcaacagaccctggattatgcttgtggagcttgaactgatttgtctgcattctacaaaaaggggttggtataccccca

SEQ ID NO: 49596 - DNA, 366 bp, Gossypium hirsutum
  Clone ID: LIB3197-006-P1-M1-C1
cccacgcgtccgaaaaggttaaacaaccaaattcggccttccgaaagagttaaacccctaaaaacacttccttcttccatctctcttctcccttaaacaacaagcttaaccctagcaacaatggcatccatgctgcaaccccaaatcattcttttgaaagaagggacggacacatcacaggggaaggcgcagctcgtcagcaacataaacgcttgcaccgcagtggctgatgtggttagaacgaccctgggtcccaggggcatggacaagctcatccacgatgacaaaggaaatgtcaccatttccaacgatggcgccaccatcatgaagctcctcgatattgtccatcctgccgccaagatcctt

SEQ ID NO: 49597 - DNA, 437 bp, Gossypium hirsutum
  Clone ID: LIB3197-006-P1-M1-C10
tcggtttaccttcttagaatatatcacatatggtcagatgatagacaatgttggcttgattgttactggaaccttgcatgagagagatgttcaggagctcttggagaagtgccatcctttgggcatgtttgacagtattgcaaccctggcagttgctcagaacatgcgcgaactctacagattggttcttgttgacactcctctggctccatacttctctgagtgtattacctctgaggatcttgatgacatgaacattgaaatcatgaggaacactctctacaaagcataccttgaagacttctacaaattttgccaaaaacttggtggtgcgaccgcagagatcatgtctgaccttcttgcctttgaggctgacagaagggctgtaaatatcaccattaacagcattgtcactgaacttacccgtgatgatcgga

SEQ ID NO: 49598 - DNA, 360 bp, Gossypium hirsutum
  Clone ID: LIB3197-006-P1-M1-C11
cttcgtttaaatctttttgggagcaaataataacaaaaatggctgagttgaaatctgacaatttgcttgagatgatgaagtttcatttgggtactgatgctggtaaagagcttactaagaagattggtcttgtttaccaactcaatattgcccccaagaaattgggggttgatgaggttacttacgttgttgatctcaagaaaggagatgttatcaaaggtgaatatgaagggggaaagcctgatgttatattttcattcaaggatgatgattttcttaagattgccactgggaagattaatccctaggttgcttttatgaggggtttaatgaagattaaggggagtctgagtttagctc

SEQ ID NO: 49599 - DNA, 450 bp, Gossypium hirsutum
  Clone ID: LIB3197-006-P1-M1-C12
cttcaaacaaaagggaattttcttgtcataatgttctgaggaattcatcgatggcaaccaaagtgtatattgtatactattccatgtatggacatgtggaaaaactagcagaggagataaagaaaggggcggcatctgttgaaggtgttgaagcgaaactatggcaggtccctgagactctgtcagatgagattcttggaaagatgagtgcaccaccaaaaagtgatgtaccgatcattacaccacatgaccttcctgaggctgatgggtttatttttggcttcccaacaagatttggcatgatgtctgcccaattcaaagcatttatggatgcaactggtggtctatggagaactcagcaacttgctggaaaacctgctgggatattctatagcactggatctcaaggtggcggacaagaaactacaccgttgactgcaatcactcagc

SEQ ID NO: 49600 - DNA, 177 bp, Gossypium hirsutum
  Clone ID: LIB3197-006-P1-M1-C2
caccctcgtcttgattttttcatcaatggccaagtacggcgaaggcgacaagcgctggatcgtggaggaaagacccgacggtgctaacgtccacaactggcactgggctgaaaccgattgcctcccctggtcgaaaatgttcttcaccaaatcgctttcggatctcaccatccttga

SEQ ID NO: 49601 - DNA, 84 bp, Gossypium hirsutum
  unsure (1)..(84): unsure at all n locations; Clone ID: LIB3197-006-P1-M1-C3
caccccaaanacgcgaaaaccaaaaaacaccagaccgggcnaaggaagcaagggggggggggaaaaaaaaagaaaccaacccgc

SEQ ID NO: 49602 - DNA, 450 bp, Gossypium hirsutum
  Clone ID: LIB3197-006-P1-M1-C4
ccctactcgcaatttgaagaagaacttaaacagatgtttctgaaatgcaaaactttgaggttacatgggaatatgaagcaggaagatagaagaaccaccttcagtgccttcaaaacagaaaaatcggcacttcttgtctctacagatgttgctgctaggggcttagattttccaaaagttagatgtatcatacagtatgattccccaggggaggcctctgaatatgtgcatagagtaggtaggacggctcgactgggtgaaagaggagaatccttgctatttctacaaccaatagaagtggattacttgcaggatctagagaaacatggtgtgtcattgacagagtatccactcctcaaaataatagattctttcccattgcacagtcaaatgcatcgtgtcaagaagtttgtttctttagaatcacatccatgggttgtatctcttcag

SEQ ID NO: 49603 - DNA, 451 bp, Gossypium hirsutum
  Clone ID: LIB3197-006-P1-M1-C5
cggacgcgtgggcaatggaattctaagtcctgtaccaacatatttggatttttgagttgctgaaagtctcagggaagaacaagtttaccttcttcagcttgtgatgagataatcgcctttgatcctgatggccaaagagtacagtggatcaccaaagcatcatcatcgactcgaagcgaagaggaacccccttacttggattctaggggttagtttcctctgcatattgttttatgtgttgggagcttggcagcgttcttctaaccccaacactactcaatttagtgcatacaatagaggtggctgtgatagtcatgttactacatccgacaatggcaatgctgtagttggtcatccatcatcaaccaacttggactttgcaagccatcatcaagttgtgctaaacagttctaaaacagtcagtcagttcccatcatgtgatatgtcattc

SEQ ID NO: 49604 - DNA, 413 bp, Gossypium hirsutum
  Clone ID: LIB3197-006-P1-M1-D1
ctcgcttttctcttcacccttacttacctgctgtgcaccttctctcacgcccggtgcatcacatctgaatcccaacatgatgtcacccccgaaaaatccgaatccgaatccgaccccgaatccgccatccttctccccagcgagaaaccccactttgaaccccccaaattactcgacttcaagcacgatgatgatgcctccggcgtcgcctccgttcctttgaccaggatcagttttaaccctgtcaaccgccacttcccaaggcgtcccttgaatccgttccgtcacaagcacaactgccgtttacataaacgcttcaggcttttgaatccacgcttacatcagaagcgcttcatttcttacggcaacgatatgatactgtccaacgagagaagtgttgacccagagtcacg

SEQ ID NO: 49605 - DNA, 405 bp, Gossypium hirsutum
  Clone ID: LIB3197-006-P1-M1-D10
cacgcgtcctgattgacgtatacaatgcctaaaataccgggggtgtagctaacatgctgagggaggggaagttaatccttttgatggccaggaggcaaagccgtacaaaaatgaccctgagattttggcgatgacaaaccttgtagcagcctatcaacgaaatgagataatagagtttgaaaaaatccttaagagtaaccgaaggacaatcatggatgatccgttcatccgaaattatattgaagatcttttgaagaatgtcagaactcaagtactacttaagcttataaaaccatatactagaatccggatccctttcatatcaaaggaactcaatgtgccagaataagatgtaaagctattcgttggtgtccttgatcttggataatcgaatcgatgggcata

SEQ ID NO: 49606 - DNA, 442 bp, Gossypium hirsutum
  Clone ID: LIB3197-006-P1-M1-D11
gtacgacagtgttcacggtcaatggaagcatcatgagcttaaggtgaaggactcagagacccttctctttggtgaaaagcctgtcacagttttcggtatcagaaaccctgaggaaatcccatgggctgaggctggagctgagtatgttgttgagtctactggtgtttttactgacaaggacaaggctgctgctcacttgaagggtggcgcgaagaaggttatcatttctgctcccagtaaggatgctcccatgtttgttgtgggtgtcaatgagaaggaatataagcctgaccttaacattgtctccaatgctagttgcaccaccaactgtcttgccccattggctaaggtgatcaacgataaatttggcattgttgagggtcttatgaccaccgtccattctattactgctacacaaaagactgttgatggtccttccatg

SEQ ID NO: 49607 - DNA, 451 bp, Gossypium hirsutum
  Clone ID: LIB3197-006-P1-M1-D12
tcttgctcctccacagcaaaagcgggtcttctctctctagaaaacttctccttcccctttgtaaaaacagtgctcaaaaattcctttatcctgttttcttcaatttgcttcttcaaaaagctctttgtttttgtagtagtagtagtagtagttcagatcttcgtcatcataagtactatatttacgcttttgtttttgcagataaaaaacctacgctgatggctggtcgttacgataaaaatcctttcgacgaggaagaagaagaagttaatcctttcgctgatacaacagcaagagggaaggcatctggccagtctaaatttggaggaggtctattttcaacgagcactgcaagcgttccacctgcctcaaactcaagactttcaccgctacctcctgaacctgctggttttagttatgagcgtgaggcaacagttgatattcctcttga

SEQ ID NO: 49608 - DNA, 449 bp, Gossypium hirsutum
  Clone ID: LIB3197-006-P1-M1-D2
gtccttaccgaggattcatatatacttcgttccaagaaagggcaacttttatttgccatgggaatacaggcaggctggctaaggagtatggggatattaacttggctcaaatttgtggtagcattgcctcagatgagaagcgccacgagacagcctataccaaaatcgttgaaaagctgtttgagattgatcctgatgaaacagtcctggcatttgctgacatgatgaagaagaaaatcgccatgccggctgagttcatctatgatggcagagattataacttatttgaccactactcagctgttgcccaaagaatcggggtttacactgctaaggactatgttgatatagtagagcacctggtggatcgatggaaggtgaaggagctagctgggctttcagccgaggggcgtaaagctcaggactacttgtgttcactttcttcgaga

SEQ ID NO: 49609 - DNA, 394 bp, Gossypium hirsutum
  Clone ID: LIB3197-006-P1-M1-D3
cccacgcgtccgcttcgccattcactccgttcacccttttttttttcattttgcctgatttttcgagttttagatttcttatataatcaactacctaatcctctcgctctctcaaccacaagctaactagcaaacacccacacatactaacatctatggggagttcagggcagcaagtctcctggaaattggcggatcacccaacacttccaaaggggaagacccttgctctcatcgttctcgatggctggggcgagtacaaacccgatgagtacaattgcattcatgttgctcaaactcccaccatggattctctcaaacagggtgcccctgaaaagtggagattaatcagagctcatggtaaggctgtagggctccccacagaggatgacat

SEQ ID NO: 49610 - DNA, 451 bp, Gossypium hirsutum
  Clone ID: LIB3197-006-P1-M1-D4
cactgaaattccaagcaaaatatcatgggcaagggtcctggtctctatcactgagggtcggaaagaaagctagagatcttctttacaaggattatcagactgaccaaaagttcactttgaccactagctctcccactggtgtttcaattacctctgccggaacgaagaaaggtgatcttttcttggctgatgttaatacccagctgaagtctaggaatgttacaactgatatcaaagtggacaccagctccaatctatttaccaccataacagttgatgaacctgcacccgggctaaaggcaatctttggcttcagagtccctgatcagaggtctggcaagattgaactccagtatttgcatgagtatgctgggattagctcaagcattggattgactgccaacccgattgttaacttctcgggtgtgcttggaacaaatgttcttgcact

SEQ ID NO: 49611 - DNA, 450 bp, Gossypium hirsutum
  Clone ID: LIB3197-006-P1-M1-D5
taaaccttcctcatttcttgttcttatgctaagagtacaaggtttatcaaaatgagctgcaatggctgtagaattcttcgaaaaggttgcagtgaaaattgtatgcttagacaaagcttacaatgtatagagaacccacaagctcaagcacacgccaccgtttttgttgctaagttctttggccgtgccggacttatgtcatttctctcctccgtcgccagtcctcaaagacctgctttgtttcagtcgcttttgtttgaagcagtgggacgggcaattaatccggtgagtggagccgtggggttgttatggacagggaactggaacgtctgtcagtcggcggtacatacggtgctccaaggcggcacgttgcagccgttgcctgaatttagtggtggggtttcaggatcggattttgaggatgttggagaaacggtcggtgttggtggc

SEQ ID NO: 49612 - DNA, 449 bp, Gossypium hirsutum
  Clone ID: LIB3197-006-P1-M1-D6
cggacgcgtgggaaatatggatcaacgttttctcatgttaatttgctatgaaatagcctgtagttttgtgttaggctcgaggttaggacctttcatttctctgtagcttctagtcaggctggcttgggcttttgagatgttgagcagttaaataggtgacaatcaaagataatgtgttgccctttctgttaacactagctgatatctgatatttgatcaacattaagtgaaacgtgataacaaaataacaaatgttttaattagaaaagcatgaaaatcttcagctatgattatagtgtttgtttgcaaaactataatctgaggttgaaagttttagctttttaaccttttagtttgatttctatttgcaaatgttaatttatgttattgttttctgtatgaatcatgcattcacctcgtcagttgcatgcgagaatgagctagtttta

SEQ ID NO: 49613 - DNA, 354 bp, Gossypium hirsutum
  Clone ID: LIB3197-006-P1-M1-D7
ctacgcttttttttttggatacaaaatttcctccttccgagaaagggccacctttattttgcgggggaatacaagccagccttcttatgaatattgggatattaacttgccttatatttcctatatcatctcttcttattataagcgctactatacactttataccaaaatctttcaaaagctgtttagatagatcctgtttaaccgcttcgccttttcttcatgctgaatataaaaaactccttttccgcttagcttatttattaatgcctagattattatcctatttaccactacttcactttttatcaaagcattatggtttacactttctctatgctatttttatttttt

SEQ ID NO: 49614 - DNA, 448 bp, Gossypium hirsutum
  Clone ID: LIB3197-006-P1-M1-D8
ggaagatctgagctgaaaacatttggcggagaaatgacagcttaggaggtgtcaatgaaaggaaattgtgttaacgtaagaggaggagaaagctgttcttctggttacagtaagtcaatggatgctaggaagaccatggaagggcaaaatggtcattccactcatcaagctgccatcagagaccctgaaacagcgctgtatacggagctatggcatgcatgtgcgggaccgctggtgaccgtccctcgcgaaggagagagcgtgttctactttcctcaaggtcacatagaacaggttgaggcgtctactaatcaggttccagaccagcatatgccagtgtataatcttccatccaagatcctttgtcgggtgattaacgttcaactaaaggctgaaccagataccgatgaggtttttgcacaagtgactctacttcctgaacctactc

SEQ ID NO: 49615 - DNA, 445 bp, Gossypium hirsutum
  Clone ID: LIB3197-006-P1-M1-E1
cagctctctcgctctctctctctctctctctctctcatcttttacatggcatctcaagccagcctccttcttcaaaaacagctcaaagatctttgtaagaatccggttgatgggttctcggctggattggtcgatgagaacaatatctttgaatggagtgtaacaattattggacctcctgatactctttatgaagggggatttttcaatgctatcatgagttttccaccaaattatccaaacagacctccaacagtcaaatttacatcagagatttggcatcctaatgtttatcctgatgggcgtgtttgcatatcaattcttcatcctccgggcgatgatccaaatggctatgagcttgcaagtgagcgctggatgccagtccatacagttgaaagtattgttttgagtatcatatcaatgctttccagccctaacgatgaat

SEQ ID NO: 49616 - DNA, 446 bp, Gossypium hirsutum
  Clone ID: LIB3197-006-P1-M1-E10
gtttagtcgaagcatttgttgtgcaaagtggaatcaactttcaacattggggaccctcttctctaacctaaagctaaggccttatgctacacctctcattggtccattacagacttgtgaatccagaatttacagcagggagaaggctgaatatgcgaatgtgaattgggatgaacttggatttgctctaactaagactgattatatgtacgtcatgaatttcactgaagaggaacaaaagttcttcaatggaaccttaactcgctttggcaacattgagatgtgcccttcatctggaatattaaactatggccaggggttattcgagggactaaaggcgtataggaaggaagacgaggggattctgctctttcgaccccaagagaatgctctgaggatgaagatcggtgcggatctaatgtgcttgccatcaccaaccgttgacc

SEQ ID NO: 49617 - DNA, 448 bp, Gossypium hirsutum
  Clone ID: LIB3197-006-P1-M1-E2
caagagcacgagaccttcgttccccagaccacccaaaagccagaagagcaagagccaaggttcatccctgaaacccaaaatggttatggcctttacggccacgagtcaggctcaggctcaggctcaggctcaagccggcccagtttcaccaccaaagaaacctatgaaccctatgtcacccctgttagattccaccctgatgaaccctataacagcatccccgaatcctccaacaataaagacacttactactacaacaagaatgcctacaagtccactaagcagcaaaacttgggcgaggccattttcaccgagaaaggatggagcaccaaggaaaaccagaacaacaactactacaacggcaacattaatggcgagaagcaaggcatgagcgatactaggtacttggagaatggaaagtactactatgacgtcaagagtgagaaca

SEQ ID NO: 49618 - DNA, 431 bp, Gossypium hirsutum
  Clone ID: LIB3197-006-P1-M1-E3
tcggttctgtcgaagcatttgttgtgcaaagttgagggaactttcaacattggaaaccgggcttctctaacctaaagctaaggccttatgctacacctctcattggtccattacagacttgtgaatccagaatttacagcagggagaaggctgaatatgcgaatgtgaattgggatgaacttggatttgctctaactaagactgattatatgtacgtcatgaatttcactgaagaggaacaaaagttcttcaatggaaccttaactcgctttggcaacattgagatgtgcccttcatctggaatattaaactatggccaggggttattcgagggactaaaggcgtataggaaggaagacgaggggattctgctcttccgaccccaagaaaatgctctgaggatgaagaacggtgcggatcgaatgtgcatg

SEQ ID NO: 49619 - DNA, 264 bp, Gossypium hirsutum
  unsure (1)..(264): unsure at all n locations; Clone ID: LIB3197-006-P1-M1-E4
agcgacggcacgaggaggcaaagacgagaaacccaaaaagggagggagcccaagggggggggaggagaaaaacaaaccnaacaanggagaccaacaaggaaagaaggggcaaggccaaaccacgaaaaaggcagacaaaacgaagaagaaaggaacgagagaaggcaaaagccagaaggaaagagaggcaaaagaaacaacaacagaagcaaaaaaaggcacacgaagaaccaggccaaaagaaacgcaaaagaccaaaagaag

SEQ ID NO: 49620 - DNA, 326 bp, Gossypium hirsutum
  Clone ID: LIB3197-006-P1-M1-E7
ttgattctggtgggagtggctaaatccagtggggtgtctaaagtatctagttggggaatatcattatgtatagtgcacttcatctttaatcctggcactagttcttttcaagaaactatacccagggcatagagaacaagagattgaaaattgcatcataaaagctgcaaagtacattgaagatatacgatatcccgattgttcttgttatgtaaattggtgaatttgcttcttttatgggacatggtttgcactcttatgtcttaaagcttctgtgaagaacttctaaatttgtttggccattcttaaaggagaatattgtttgc

SEQ ID NO: 49621 - DNA, 440 bp, Gossypium hirsutum
  Clone ID: LIB3197-006-P1-M1-E9
gttcagtcgaagcatttgttgtgcaaagttgaatcaactttcaacatttgaaaccctcttctctaacctaaagctaaggccttatgctacacctctcattggtccattacagacttgtgaatccagaatttacagcagggagaaggctgaatatgcgaatgtgaattgggatgaacttggatttgctctaactaagactgattatatgtacgtcatgaatttcactgaagaggaacaaaagttcttcaatggaaccttaactcgctttggcaacattgagatgtgcccttcatctggaatattaaactatggccaggggttattcgagggactaaaggcgtataggaaggaagacgaggggattctgctcttccgaccccaagagaatgctctgaggatgaagatcggtgcggatcgaatgtgcatgccatcaccaaccg

SEQ ID NO: 49622 - DNA, 449 bp, Gossypium hirsutum
  unsure (1)..(449): unsure at all n locations; Clone ID: LIB3197-006-P1-M1-F1
gaaaaagatttatttaggaaatattggattctcagaaagatcgagcagtaggaaattgaggaaaaaaaaaatctttggcctttgtttaacaaatctagctcgtagaattgaacggcagccactaaaaaaatacgttcggtgattaatagattttttttactcaagaaatggcgggaagagctcaaattccgacaagtaattcagcactaattgccatgattgctgatgaggatacagtaactggatttttgatggctggagttggaaatgtggatttaaggagaaaaacaaactatctaatcgttgattcaaaaacaacagtgaaagcaattgaagatacattcaaagactacaccacangggaggatattgcaattattttgatcagtcaatatgttgcaaacatgataaggtttctagttgatagctacaataagccggttcctgca

SEQ ID NO: 49623 - DNA, 348 bp, Gossypium hirsutum
  Clone ID: LIB3197-006-P1-M1-F2
gataatataatatggagaaatggtatggggttttagggttggtgttggttttgagtttgttctgtggggttaaaggagaaccccaagttccatgttacttcatttttggagattcattggtagataatgggaacaataatgaacttcgttcattggccagagctgattacttgccttatgggattgactttgctaatggaccgaccggccggttttcaaacggtcgaactacggtggatgtcatagctgaacttttggggtttgacgattacatccctccatactcaactgcaagtggtagacaaatactgggaggagttaactatgcatctgctgctgctggaatca

SEQ ID NO: 49624 - DNA, 441 bp, Gossypium hirsutum
  Clone ID: LIB3197-006-P1-M1-F3
ccttctgcttagcttaaaaaatcttgaatccgtgctctcctacttccctcgttatgggcaatggcttcggacaagaagattaagatcgggattaacggatttggaagaatcggacgtttggttgccagagttgctcttcagaggaacgatgttgaactcgtcgccgttaacgatcccttcatttccaccgattatatgacatacatgttcaaatacgacagcgttcacggtcaatggaagcaccatgatcttaaggtcaaagactctaaaaccctcctcttcggcgaaaaacccgtcactgttttcggaatcaggaaccctgaggagattccatgggctgaagccggcgctgagttcgttgttgagtcaactggagtgttcactgacaaagacaaggctgctgctcacttgaagggtggtgctaagaaagttgtgatatct

SEQ ID NO: 49625 - DNA, 426 bp, Gossypium hirsutum
  Clone ID: LIB3197-006-P1-M1-F7
acctacgcattatgatttatattggaaattttgtattctggggaggaaccatcagcaggagagggagggaaaaaaaaatctttgtccttttttaaacaaatatagctcgctaaattgaacggcagccactaaaaaaatacgttcggtgattaatagattttttttactcaagaaatggcgttaagagctcaaattcctacaagtaattcaacactaattgccatgattgctgatgaggatacagtaactggatttttgatggctggagttggaaatgttgatttaaggagaaaaacaaactatctaatcgttgattcaaaaacaacattgaaagcaattgaagatacatccaaagactacaccacaagggaggatattgcaattattttgatcagtcattatgttgcaaacatgataatgtttcta

SEQ ID NO: 49626 - DNA, 441 bp, Gossypium hirsutum
  Clone ID: LIB3197-006-P1-M1-F8
cttttggtggtttgttccgatgttcaaagattgtgggtattggatctcggtggcttctcaatgttgacgcgtctgcagagtaacaaacttttctccaaggttcttctgagtcgttacaataatgggtttcccaatcttatctctgggtctcaatttttaagaggttttaacgagattacaaagcataggttttctgtaatgtcgggtgaaaatctaagaagcctatctaactgtgcttgcccgaggaattaccgagtcgtaatggctgcaactcgtgaaatggggatagggaaagatggcaagttgccatggagattgccttctgatctcaaattcttcaaggaacttacagtgacaacatcagatcctgagaagaagaatgctgtagtaatgggtagaaaaacctgggagagtattccacttgagtttagacctttaccc

SEQ ID NO: 49627 - DNA, 433 bp, Gossypium hirsutum
  unsure (1)..(433): unsure at all n locations; Clone ID: LIB3197-006-P1-M1-G1
cccacgcgtccgatcacgagcacagagaagacgatgacgcccccgccgccgatggtgaagacaccggtgctcaagttgcccctatcgtcaggcttgaggaagtcgccgttaccaccggcgaggaagaagaagatgccatactcgatctgaagtcgaaactgtaccgatttgataaagacgggaatcaatggaaagagagaggcgctggtactgtgaagctgttgaagcacaaaaagaccggaaaagttcgccttgttatgaggcaatctaagactctcaagatctgcgccaatcattatgtgttggcaacgatgacggtgcangagcacgcagggaacgacaaatcgtgcctatggcacgcttctgactttgctgatgatgaactgaaagatgaacttttctgcattcgttttgcatcagtggacaattgcaa

SEQ ID NO: 49628 - DNA, 450 bp, Gossypium hirsutum
  Clone ID: LIB3197-006-P1-M1-G2
gtttttggtgtaatctttgataccctttttataaaaaaaccagccctctagctggtcagagtttagtcttcactccctagaataattttctctttctcacttccaccaacgaaaaagtcgtcgatcggatcacgtattagattgatattgtaaagatgtctccaactgaatcatcacgagaggaaaatgtttacatggccaagctggctgagcaggctgaacgctatgaggaaatggtggagttcatggaggaagttgcaaaaactgttgatgttgaggagctgactgttgaggaacggaaccttctctcagtggcttacaaaaatgtgattggggcaaggagggcgtcttggaggatcatctcttccattgagcagaaggaagagagcagaggaaatgaggatcatgttgcacaactaaaggagtataggggtaagattgaagctgagc

SEQ ID NO: 49629 - DNA, 413 bp, Gossypium hirsutum
  Clone ID: LIB3197-006-P1-M1-G7
gagaaaccagagagagaaaaaaaagaaagaaaaaatggttctgctagacaagagaggtgggacgatgtagtagctgggcctcaacctgaacgtggtctcggcaggcttaggaagatcaccacccagcctttgtccatcaaagatgaaggagaaaagaaaaagtaccagaggtcgttgtcgctgccgaatagtccagtgtcaggtccgacacccgtgacaccgacgactccgacggcgcgtaaggagaacgtgtggaggagtgtgttccatccgggtagcaacctagccaccaaaagtataggttctgatgttttcgacaagccacaacccaactctcctaccgtctatgactggtgcgtatacctcgtaccatgcatgcatggattttgtctggctgctacttctttagccac

SEQ ID NO: 49630 - DNA, 444 bp, Gossypium hirsutum
  Clone ID: LIB3197-006-P1-M1-G8
cccacgcgtccgaaaactataccctagcccctgaatctagcaagcaaataaaagccaacatcaaggtgtcatcaactgagaccggagtcatatttggcaacattgtttatgagacttcgaatgtgcttgaaagaactgttgttgttcttaatgacattcatattgatatcatggattatatttctcctgccgtttgtaccgatgctgcattcagaactatgtgggcagaatttgagtgggaaaacaaggttgctgttaacactgtaatccaagatgagaaggaattccttaatcatattatcaagtcaaccaatatgaagtgtctcacaccagtatctgcgctagatgatgagtgcggattcctggcagctaacctttacgcgaaaagtgtgtttggggaggatgccttggtaaatttgagcgttgagaaacaagcagatggga

SEQ ID NO: 49631 - DNA, 443 bp, Gossypium hirsutum
  Clone ID: LIB3197-006-P1-M1-G9
ctttcacctcttcctttgttcctcatcctctgggcgcgtctcttcccggatgcgtggcggccggatttaacaagttttcaaacgaaaaatgagggaaatccttcacgtacaaggcgggcaatgcgggaaccagatcggatccaagttctgggaagtggtttgcgacgagcacggcattgaccctaccggacgctataccggaaactccagtctacaattggagcgcgttaacgtttactacaatgaggcttcttgtggaaggtttgtcccacgcgccgtgctcatggatcttgagcccgggaccatggatagtgtgagaaccgggccttatggtcagatctttaggcccgataactttgtcttcggccaatctggagctggtaataattgggctaaggggcattatactgaaggagccgagcttattgattctgttcttgatg

SEQ ID NO: 49632 - DNA, 338 bp, Gossypium hirsutum
  Clone ID: LIB3197-006-P1-M1-H2
atggggaactgagacacacaacacctggaaaatcgggtaactcccaccccaatactgcgctttaagcaaacaggcacaccaggagatcatatcccacacctggccgggagggtcccacacccacggagcctccctcattgctagcacagcagtctgtgatctaccggcaaggcagcagcgaggctgggggaggggcgcccgccattgctgaggcttaagtaggtaaacaaagctgctgggaagctccaagtgggtggagctcacagcagcccaaggaaacctgcctgtctctgtagactccacctctggggacagggcaataacaaacacagctgaaa

SEQ ID NO: 49633 - DNA, 240 bp, Gossypium hirsutum
  Clone ID: LIB3197-007-P1-M1-A10
aaactatcaccattttcaactattacttatatcaaaatctaccaaatccttcttcttattatttcattccatctatctataaaattcttttactattcctatcatcaaccaacttcctttatacctaaatcaatttatcaacataaatactacatctttttattcatacttatcatttcttattcacattaatcacaattattatcctctataacatatcattatattcttctaactata

SEQ ID NO: 49634 - DNA, 339 bp, Gossypium hirsutum
  Clone ID: LIB3197-007-P1-M1-A11
atttgttttttttttctctcactaaggaaaaaaacaccttttttctctttcaaaaggacagtttttttttcttacacacacaacaaaattccaataaattcccttaatttctcttagtttttgcttacgaaaatactttatacgtattcaccaatgcatgatctttcgatccaatgtaatttcgacccataaaacacgcttgatttgactcactgagttggagaaaaaattatgatagaagcaatggagagttccgtcgtcaatggcagtggtttcactcagttacaacagagctatggagatagtagtgaagaagagctatcggtgttgccacgtcac

SEQ ID NO: 49635 - DNA, 330 bp, Gossypium hirsutum
  Clone ID: LIB3197-007-P1-M1-A2
atcaacggtgaagttatgcctggtcaatgggaattccaagttggtccatctggtggaatatctgcaggtgatcaaatatggattgcacgatacatactcgagcgaatcactgaaatcgcaggagttgttctttcttttgatcccaaacccattccgggtgactggaatggtgctggtgctcatactaattacagcacaaagtcaatgagaaatgatggtggcatcaatgttatcaagaaggcgattgagaagttgggtctgcgccacaaggagcatattgccgcctacggagagggtaacgagagacgtctaactggtcgtcatgagact

SEQ ID NO: 49636 - DNA, 270 bp, Gossypium hirsutum
  Clone ID: LIB3197-007-P1-M1-A5
gcccgcacctacccctccggaattactctatcgacccacttctacattttgttatctattcccctccgtgaggaaagggacacacttttttggtgtttaggaggacacaatttttttcttacacacacaacaaaaatccactacatacccttcatttctctaaatttttgcttaccaaaatactttatacttattaaccaatacatcatatttctatccaatttaattttgaaccatactacaaccttgattagtctaacttaattgacg

SEQ ID NO: 49637 - DNA, 236 bp, Gossypium hirsutum
  Clone ID: LIB3197-007-P1-M1-A9
gttcaatgacttcttgaggaatgccagttgtgtcgatgaaattaccaagggagaactggctccattttcaactttgaccggtgacgaaagctaccaaagccgggatcttgagaaggcatcccaacaagcttcaaagtccctttacgatgccaaggtgcaaccaactaccttgataccaaagcaagttggcaacatgtatactgcatctctttatgctgcctttgcatcccttattc

SEQ ID NO: 49638 - DNA, 433 bp, Gossypium hirsutum
  unsure (1)..(433): unsure at all n locations; Clone ID: LIB3197-007-P1-M1-B11
gtggaaattgatattagggaagagtgtggagcatcattgactgcgcgaaaatgagattanagaatgtaaggagaagttagaaaattgtgaagtggagttaaggcacttgcagagtaaaaaggaggagttgcagaaagaagcagatagattgaatgaggttgcagagaaagcacagatggatgcattgaaagctgaggaagaagttgcaaacatcatgcttttagctgagcaagctgttgcttttgaattggaagctacacagcatgtgaatgatgcagagatagctctgcaaaaagctgaaaagtctctttctaatttgattgttgagactgttgagcagcaggtttcggccgaagagactgttattgatgaggagaccagtcccgggggtcctaatgatgnttttgttgaaagagaaagggatgctttgatt

SEQ ID NO: 49639 - DNA, 431 bp, Gossypium hirsutum
  Clone ID: LIB3197-007-P1-M1-B12
atgagaagccccaactggtgctgatggatcgtcaaatcccaatgcaccatcaatgatcacacaggtcactcagcaaatgcaaattccgctatcttatgctgatgctgttattgggacagctggtgctagcattagctatattcgacgtgttagtggggcaactgtcaccattcaagaaactaggggtgttcctggggaaatgacagttgaaataagtggtactgctttcacaagttcaaactgctcagcaactgatacagaattttatggctgaagctgccgcaccagcacaggcacaagttggtggggctgcagaccaagcttataatccgtatgcagctcatggttcttctatacgcatcaccaccatccaatccaggacatgcgggtggctattgctatggtcaaactatgggtactaagcaaagggt

SEQ ID NO: 49640 - DNA, 275 bp, Gossypium hirsutum
  Clone ID: LIB3197-007-P1-M1-B4
ccgacctattccccctttttacttatatcattcaataattttcatgggcaaatataaatgggagagtgtgtttccattcacattggtcaggccggaattcacgtcggaaatgcttgatgggaactttactgtctcgagcatggcattcatcctgatggccaaatgcctactgacaagacttttggtggaagagacgatgctttcaacacctttttcaacgaaaccggtgccggaaaacacgtccctccagctatatttgttgatctggaacctac

SEQ ID NO: 49641 - DNA, 154 bp, Gossypium hirsutum
  Clone ID: LIB3197-007-P1-M1-B7
tattcgtccttttaaaatatgtctctattgagtgaaaatatgcaaaggcggcgcgggggaaatggtaccattgatattacatatttcaagatatattaaagtttctgctggaggaaatgggcatgcccattggacttttgccccttaaatacat

SEQ ID NO: 49642 - DNA, 362 bp, Gossypium hirsutum
  Clone ID: LIB3197-007-P1-M1-C10
tttcaatgacttcttgatgaatgccagttcgtgctatgaaattacgaaggaagggctggctacatttttaactttgaccggtgaccaaagctaccaaagccgacatcttgagaaggcatcccaacaagcttcaaagtccctttacgatgccaaggtgcaaccaactaccttgataccaaagcaagctgtcaacatgtatactgcatctctttatgcttcctttgcataccttattcacatcaaacacactgaattggcatgaaagcagctgattttattcctcttacggaagtggtttaacatgacacaatgttttcatttgcattccatgaatgtcaacatccctttagcctatcgaacat

SEQ ID NO: 49643 - DNA, 362 bp, Gossypium hirsutum
  Clone ID: LIB3197-007-P1-M1-C2
tctattaactgcttgaagacaagaaagaagaccagaaagctggcgacgcctctttggtgaagggcattgatggagtcccatacttgaaggcctacctcgccgcaagggtttctttcaagtctggcatgaaaccgcacgagcttgtcttctataaggtattttgcattcccttatgttaaagggattttacttttgaattcttttggtttagattatctatggttttattatggggtgctattgctatatgtccagaacctaaattttggatagtatcttctgttttgcaagaaacttaaagatttccttaatttcgtttgtgttcttggctttaatttaattgaaagctttgttttattttt

SEQ ID NO: 49644 - DNA, 252 bp, Gossypium hirsutum
  Clone ID: LIB3197-007-P1-M1-C4
aaaaaaatggccaaattattgctgttcattgcactatggggggttccatgtcttgttagtgctacacgcatggtgaagaacccgttggtggttcaaggtcaagtttactgtgaccattgccgtgctgggtttgaaacaccaaagactagaaacatggctggtgccaaggttaaggtggtatgttccaaccggaagaccggtgatgtcgtgtacgagaaggaaggacacacggattcaaccggacaatacaag

SEQ ID NO: 49645 - DNA, 140 bp, Gossypium hirsutum
  Clone ID: LIB3197-007-P1-M1-C6
ttgatcactttcttctctgttcctctcctaatcaattgggttactatttcacgggtaagggagatcaaagggaaaataaaatgtcttcacttcgttcaaatccggttcacaaaattcatcctgagcctatcgatcacttc

SEQ ID NO: 49646 - DNA, 380 bp, Gossypium hirsutum
  Clone ID: LIB3197-007-P1-M1-D1
cccacgcgtccgcttcaatctggttccctgtgccaaattcctaccgaggcaagagcatgaccttccagttcttctcccctcaggcatgcatatgcttctgctgcaaaaggagaggggatatctctatggataaccgtcttcaacgccattaagtttcccctcagatcccatcctactaagcctgtcgctgatctgaaggttctactgtcaaacgctgcatcaaaataaattcttgttctcgccataaagcgtaacagaagagcagacactgaccactattacttctcttgaaaacccaggacattctcggaagacatggatacttccttcaaccgccgagcaacatcgaggacatctatcattggatataaccctcctgt

SEQ ID NO: 49647 - DNA, 328 bp, Gossypium hirsutum
  Clone ID: LIB3197-007-P1-M1-D2
catacctgtgtttcaccactcggattatctgttcggcaacgtcttcctggtggtggaagtggtgaacactgacggctaagtaacaagttagcaaaatgggacctggtggaccgggaggagggccgggaggaccaggtggaccgggaggatggggaggaggacctggtggttggggtcctggccctggaggacctggcggatttgggcccggaggtcctggttggggtccgggacctggaggtccctggggccctggatttggaggtcctggtttttggcctggtgggttctttggcggctttgcagatggtttgtgcaatatgatatc

SEQ ID NO: 49648 - DNA, 140 bp, Gossypium hirsutum
  Clone ID: LIB3197-007-P1-M1-D3
aatggaggtagagaatgcataaaaagtaagggtggaacagaaaaagaagcatggagggaaacactataagccaaagccatgggacgaagacccaaacatagaccgttggaagattgaaaagtttgacccttcttggaacc

SEQ ID NO: 49649 - DNA, 176 bp, Gossypium hirsutum
  Clone ID: LIB3197-007-P1-M1-D8
ttacttctatacaacactgatcgggaaccagttactaagcgaacgtggccatcaccttttaaacatgattttgaaaatttatgatgtcatttttacatcgaactactgaagaataatcaatctcctgcataaacattaaggttacagttcattaattgaacaaggatcctcactat

SEQ ID NO: 49650 - DNA, 436 bp, Gossypium hirsutum
  Clone ID: LIB3197-007-P1-M1-E1
cttcccccttttacactcccccttcagatatcttcattttcatcttcttcctctttctttctgttctttgttttcttcaaatactgccctttcattttccttagttcttgttaaaaagaaaatgtgtgggattttagctgttttgggctgttctgatgattctcaggcaaaaagggttcgggtgctggaactttcccgtaggctcaagcaccgtggtcctgactggagtggcctctaccaacatggagactgttatttggcccatcaacgccttgccatcattgatcctgcttccggtgaccaacctctctttaatgaagacaagtctattggtgtcactgtcaatggagagatttacaaccatgaaaaactaaagaagaagttggcccaccacaagttcaaggcctggcagtgactgcgatgttatttcccatct

SEQ ID NO: 49651 - DNA, 404 bp, Gossypium hirsutum
  unsure (1)..(404): unsure at all n locations; Clone ID: LIB3197-007-P1-M1-E12
tttaagctgaacaaacacatctggatccgggggatccgaattgggggtagaaggattantttcctcattgctcgcaagagaaattattattaatattcaaaggaagagctctactctctagtaactgttgctgaaatcccatctgaaggattgaagggtttttgcactaatgtcattgactattattattagtaatttattgatgtttagttctatgaaaaacttgcatttatttaccaagaaatttacccatagttttggctagttttatatttgtgacctgtgagacatcatttctactaatatttttgttaattgttgtcaagactatttaagctttgttcttgtgcaattgaaatttttctcatattttatagttttatttttattatttatattatttt

SEQ ID NO: 49652 - DNA, 381 bp, Gossypium hirsutum
  Clone ID: LIB3197-007-P1-M1-E2
gaaaagcaaaaaaatggctcatcgtatggcgttttctctgtgtgtcatttcgggttttttattcatcggtttgatatcatcggaggctttctcggtcgtcggatcagaagttgatccgttgatcaggcaagtaacggacggtcaagatgatggagtggagacacagcccttgaccgctgagcatcacttctcgctgttcaaggctcggttcaagaaatcgtacggctcggaggaggagcatgattaccggttcaaggttttccgggcgaacttgagacgagcggagcgtcatcagaagcttgacccgtccgcgactcacggtgtgactcagttctccgatttgactccccgtgagttcaggaagaggtttttggggttaag

SEQ ID NO: 49653 - DNA, 358 bp, Gossypium hirsutum
  unsure (1)..(358): unsure at all n locations; Clone ID: LIB3197-007-P1-M1-E6
agacgtctttgaaacactgatcgggaagcaggaacagatcttactggcaacgcaggttgtaaagatgattttgaaaattgatgatgtcatttctccatcggactactgaggtataatttctgtactgcttcactctgaaggttaccgtgttttgattgttttgtatggttcactccagaacaattgttcacttgtgaggaacatgttttgcttatgtatttttcaactgccaagctctttgttggttggaaatagaatgataaacccttcgtattgacaacggttgtttatgtttttttttaaaaaaaaaaaananaaaaaaataaaaaaaaaaaaaaaaaaaaaatataatntntat

SEQ ID NO: 49654 - DNA, 400 bp, Gossypium hirsutum
  unsure (1)..(400): unsure at all n locations; Clone ID: LIB3197-007-P1-M1-F1
gatttcattgcctgtaaatgcttcctcaatgtacggacaatctcagccaatgaacattccacctcagatcgccggctccggcgctgacatcgacgacgatgtttcagcctccgtatccgtcgataaccaccacatcgttacttacgaggctccctccctcgacgacggtggtggagtagacgacgtagccacccaatcctttctacgccactgccgccgctacttccgcctctggcttggatgttgttccacgaggcgatggtgccagccaactcactctatcgtttcgtggtcaggtctatgtgtttgatgctattactcctgagaagtttcatgcagtggtgttactggtgggtggatgtgaactgacttcangcccccatggtgttgaaatgtcatc

SEQ ID NO: 49655 - DNA, 447 bp, Gossypium hirsutum
  Clone ID: LIB3197-007-P1-M1-F4
aaaagagggaaggaaggtaggaaggaaggaaggaaagaattaataaaataaaataaaagaaaatcgcagatcagacagagaaaaaccctaacctaaatctaaatgggtaagaagaagaaaagagttccgtcaaaggtatggtgttactattgcgacagggaattcgatgacgagaagatcctggtgcagcaccagaaagccaagcacttcaagtgccatgtctgccacaagaagctctccaccgccggtggtatggccatccacgttcttcaggttcacaaggagtccgtcaccaaggtcctaatgcaaaacctggcagagaatcgactgacattgaaatatacggaatgcaaggaatcccgcctgatgtgctggctgctcactatggagaagaagaagaagaagctccatcaaaagcggccaaactggatatcccatctactcagc

SEQ ID NO: 49656 - DNA, 441 bp, Gossypium hirsutum
  Clone ID: LIB3197-007-P1-M1-F5
gaaccaccgcatttcaaattgttatctctgagggtgtcttaataaacgccttggatttaccttcgatttccatttacttctctattgctacgtttttgaatttttagtgagcgaaaatgagagagtgcatttcagtccacatcggtcaggctggtattcaagtcggaaatgcctgctgggaactttactgccttgaacatggaatccagcctgatggccagatgccaagtgacaagactgtcggaggaggtgatgatgcttttaacacctttttcagtgaaactggtgctggaaagcacgtccctcgtgctgtctttgtggatcttgagcctactgttattgatgaagtgaggactggtacttaccgtcagcttttccaccctgagcaactcatcagcggcaaggaagacgctggcaacaacttcgctcgtggccactaca

SEQ ID NO: 49657 - DNA, 442 bp, Gossypium hirsutum
  Clone ID: LIB3197-007-P1-M1-F6
cattaactcattcatacattttccttcattgtctcggcgaattcgaaaccgaaaacgcaagaaatttttcattttttcttgattcccagcaacttttcaatctgggttttgcttgaatattcatattaactttgttttataccaaaaaaaaaagatgacagaagcgagtaagaaaagcatgaatccagacccagttcatgttcaaagcacagcttcatcaaacgaaacaagatcaaacaacaatctccccaattttcttctttcagtgaggctaaaatacgtgaagctcggctaccattatttaatctccaacgccatgtatctaatgctggtgccgttattagccattgcttcagctcatctctcaacgctcacggtccttgatttggttcaactatgggaccaactcaagttcaatcttgtctctgttactttatgttca

SEQ ID NO: 49658 - DNA, 237 bp, Gossypium hirsutum
  Clone ID: LIB3197-007-P1-M1-G2
actttcacgcgtttgtgtttcttccgcattctggatacagggagttttgaagagggaactgttgattgtcaatacattgtgccgtagaaaggtggaaaggtggctgtgcccgcctagatgaaacaagagaaggttgtcaatcctttatttgagaagcgttcaatgcatctttgcatttggtaggggctttacctcctaagtaaggattagcatcgacttgtgaagtggcctatggtt

SEQ ID NO: 49659 - DNA, 253 bp, Gossypium hirsutum
  Clone ID: LIB3197-007-P1-M1-G8
tttaggtcagccaattgtttgagctagctagcgtcttactcaaatggcatccagaactattatgttgcaaatattttcacttttcttctttttgttcagtatctgcaactccattttccttggcgctaatggagatgacaatggtggttgtctaactgcccatgccaccttctacggtggtgctgatgctaccggcacaatggggggagcttgtggttattgaaacctgttcagtcaatggtatggaacgagc

SEQ ID NO: 49660 - DNA, 358 bp, Gossypium hirsutum
  Clone ID: LIB3197-007-P1-M1-G9
gttcccttgatttctacgaaaatggtctttgatttttattttcattgaatcaccaaaatgggcggaggagctatgagagcggcggcgaaagttgccggagcgggaattgttaacactggccttcgtggcggtgttcaggtggctccgtcgtctgcggaatactccgtcatgtgcgtcgccgcttctcgttcggcttcttccggaatttctgtttctggcggtggggtgtcttccgtcgctgacatgacggcgtcgcccaatcagatgatgtcatgggagatggtggacgattgggagtttgctgggggtgttgaagaggaggtgccctccgtcattttctgtggatgagagctcgatt

SEQ ID NO: 49661 - DNA, 410 bp, Gossypium hirsutum
  Clone ID: LIB3197-007-P1-M1-H10
cggacgcgtgggcggacgcgtgggcggacgcgtgggcagggatatacagagggctcttctctgtcactaagagatacaacaaaaaaaaaaaatatagccaaaaaaaaaacacacacatagattctctctttcaaaaaaagaagaagaaggaaattagggttttttcttttgtggggttttgattttttgggggaattttgggggtttttttgggtgggggaagagagatgtatataggttccatgcgaaagtctttcaaggactctcttaaagtacttgaagctgatattcaacatgccaatactctggcttctgattttccaagggaatatgacggtgaatgccttcaaatgagaatgtcatacagtccgggtgcacaccttttcctatttttgggcaagggactgact

SEQ ID NO: 49662 - DNA, 321 bp, Gossypium hirsutum
  unsure (1)..(321): unsure at all n locations; Clone ID: LIB3197-007-P1-M1-H4
cggacgcgtgggcggacgcgtgggcggacgggtggncanggatatacaggaggctcttctctgtcactaagagattgacgtgggttttggttgttgcctaattctcccacaataggggcattgcagtgacctccactggccttggtgagcagaaaaactactatctagcttctgacccttatgctggaactccccctttaggttcacatggcacaccaccatctttaggaggtggatcaccttcctctcatggaaccccgtcacatggagggggttaccaccctttaccaacaccatctacgccttctggtggaaattgtg

SEQ ID NO: 49663 - DNA, 360 bp, Gossypium hirsutum
  Clone ID: LIB3197-007-P1-M1-H5
gtcgattcattcctaagaaaattttcaacgttatttagggagcatagaaaagaacgttggggaggaaagatgttgggaatagtaaggcaaaaaatgttagggcagtcattgctgaagattcgtcctgcaatatcggtgttacgaagctactcatcagcagcaaaacagatgacagtgagagaggcattgaactctgctcttgatgaggaaatgtcagctgatccgaaagtctttttaatgggtgaagaggttggagaatatcagggtgcatacaagatatccaaggggcttttggagaagtatggacctgaaaaggttttttgatactccaattactgagggcttgtttttgctggggat

SEQ ID NO: 49664 - DNA, 435 bp, Gossypium hirsutum
  Clone ID: LIB3197-007-P1-M1-H7
cccacgcgtccggatactcgatacacatgctgatgtgtttgtttgggttggtcagtgcgtagaccccaaagaaaagaaaaatgcttttgaaattggtcagaaatttatagacatggctgcatctctagaaggtttgtctccacatgttccactttacaaagttactgaaggaaatgaaccttgcttcttcacaacattcttctcatgggattccacccaagctactgttcaaggaaactcattccagaagaaggtggctttgctctttggggctagccatgctgtagagggccaggatcgatccaacggaaatcaagggggacctacacaaagagcttcagcgttagctgccttatcatctgcatttaatccatcatcagctagcaaagcctctactccaaagccttccagcactagtcagggatcacaaagagc

SEQ ID NO: 49665 - DNA, 416 bp, Gossypium hirsutum
  Clone ID: LIB3197-007-P1-M1-H9
gggtgtcttaataaacgccttcgatttactgtcggtttccatttacgggttggggtctacgtttttgaatttttagtaagcgaaaatgagagagtgcatttcagttcacatcggtcaggctggtatccaagtcggaaatgcctgctgggagctttactgccttgaacatggaatccagcctgatggccagatgccaagtgacaagactgtcggaggaggtgaataatgcttttaacacctttttcagtgaaactggtgctggaaagcacgtccctcgtgctgtctttgtggatcttgagcctactgttattgatgaagtgaggactggtacttaccgtcagcttttccaccctgagcaactcatcagcgtcaaggaagatgctgccaacaacttctcccgtggccattacactatt

SEQ ID NO: 49666 - DNA, 233 bp, Gossypium hirsutum
  Clone ID: LIB3197-008-P1-M1-A1
aaaaaactcaattgaatgaatgtataaatcaactttctacctattaaagaaaaaagctcttttactctctccttctcttgatcaagcaaaatctggattcaacaaggacttcccttcaactaaaacccttttgattcgagaacaaaactccgggtctttttttttctttgcgttcttgaccagtgtttaatcgaaaatttgtagcttttttttttggggggggggtggtgagt

SEQ ID NO: 49667 - DNA, 365 bp, Gossypium hirsutum
  Clone ID: LIB3197-008-P1-M1-A11
tctatctaatcactaagacaatatcctattatcacgactccatcttccaaaaaagaaggatgtaaacttacaccacatatatgaaatgaactattcttctcttcaaatatcatactttcgtaatactgatctaactgttaaagctctcagtcctaaaagtataaactacacaacctcagacctatacttccttactacacaacaaacatgtctaccttccactaaaatactcgacataatcctcaaaatgctccattataccctgatactgactatacacttttaacaccaatgcagacataaccctctgcttaacaagttcctgcttatgatccaaatttacatgctaaaccatcctatgtatc

SEQ ID NO: 49668 - DNA, 280 bp, Gossypium hirsutum
  Clone ID: LIB3197-008-P1-M1-A12
ttcgttagacatgtgaatgctgcgagcaggagctggagaactactgccctcggaggagatttacctacaactcttacaatccaaacgggacaaaaaattatggaggttattcggatatgattgtggttgaccagcgctatgtgctacggtttcctgataacttgccactgaatgcgggtgcaccattgttatgtgcaaggatcacagtgtacagccctatgaaagattatggaatgaccgaggcaggcaagcatctatgtgtttctggactcggtgggct

SEQ ID NO: 49669 - DNA, 229 bp, Gossypium hirsutum
  Clone ID: LIB3197-008-P1-M1-A2
ctctcatattgatcagatcacaacccttctggctaaggagcagaatattatatcagaaggggaacatgatcttgcaaacagcaagtcggaactcaccgagaaagataaaacccaaaacgatattttgcagcaagaggcaaatttaaagtcagacattgagaagcagaagaagcttgttgctcaatttaagaggagagctgagagtctcgcaaaggaaaaggagcaattg

SEQ ID NO: 49670 - DNA, 419 bp, Gossypium hirsutum
  Clone ID: LIB3197-008-P1-M1-A4
ctcaacattaaataaaaagggaagaaattagaacaaaagagagggagagggagagagagaaaggaaaaggataaagaaaccccaatcccccttttgtttacaaaggggaagattttaatgttccaacccaccaacctccatttcttcatcgtaaagtctcctgttatccaattatttacgtccatgtcgcattagcactcgattaccgtgagaaagggtaaaacggggcaacataaataggagagaaagagatggatttgagtttcagaagaggtgaagctaaaggcagtgttgttgcaggctctgtctgggaaactagaatgaagagtgatgaagttaaagatggaattaaggttttcaatgctggcaccattactgaagaaaacagtaatggtgttggtggtactaaaagattgagc

SEQ ID NO: 49671 - DNA, 432 bp, Gossypium hirsutum
  Clone ID: LIB3197-008-P1-M1-A5
cggacgcgtgggctaaaaccctaatttgatctccaaataccttcgagatctccaagcttcgtcaccccaaaatggccacgacacgcagatcccttcctcttctgagaaccctcatagccggaaaaacccaaacccgaaacgtgacgtacatgccccgaccaggagatggagccccaagactcgtaacgttaatccccggagacgggatcggacctttggtgacgaacgcggtggaacaagtgatggaagcgatgcacgctccggtttacttcgagaagtacgatgttcacggtgacatgaaacgggtaccacaagaagtgttggattcgataaagaagaacaagggttgtttgaaaggagggttaagaacacccatgggaggtggagtcagttcattgaatatgcaattgaggaaagaactggatctatacg

SEQ ID NO: 49672 - DNA, 455 bp, Gossypium hirsutum
  unsure (1)..(455): unsure at all n locations; Clone ID: LIB3197-008-P1-M1-A6
gttccaaccatggataacagagtatcttacttctcagcatcaatcctcacgacacctggaagaaacttcagttagagctcatgacagggttcaagcttcaacaacaaaagccttgctggagaaattttcgaaacttgatagagaagcaggcattggaatatcaagctttatgagtgattctgaatttagtggaaatgtgagggaagcagtttcattatcgagaaatgccccacctggccctcctccattgtgttcaatatgtcagcataaggcccctgtatttgggaaaccgccgaggtggtttacctatgctgaattggagcttgcaactggtggattttcacaagctaatttcttggctgagggtgggtttggatccgttcatagaggacttctcccagatggtcaggcaattgcagtgaagcaacacanattggctagttctcaaggagatc

SEQ ID NO: 49673 - DNA, 416 bp, Gossypium hirsutum
  Clone ID: LIB3197-008-P1-M1-A8
ccttcaccagtttagcttttgaatggcttctacagttaaacccattttcatcctccttgtattcatttcattccatttctcaccgttagcatcgaaacccaatgacccaacaccatcaacatggcctcttcaattccactccgttctcttcatgaacaacagtggcactctccagaaagttgatctctggtacgactggcctaatggccgcaatttcaacattattcagaaccagctcggtaagctcctttacgaccttgaatgggacaatggcacttcgtttatctacactctggattccaacaaagaatgcagaatcttgcactttgatgtcggtattctccgtcctaattggcttgatggagctaattacttgggacaacaacaaaaagatgggttcctttgcaatgtttggg

SEQ ID NO: 49674 - DNA, 209 bp, Gossypium hirsutum
  Clone ID: LIB3197-008-P1-M1-A9
gataaaattcctcttttcctgccgtcaacgggcttaatctttgtttggggcccgagaatatcaacaatgactcgcggcaaccagagagaaaaagatagagttagggctcattccaagtcacgcaacaaatgaaaagctgattccaaggaccatggattgaccgctttactactccgtgaaagagatgcaaaggccttacatgaaaaggc

SEQ ID NO: 49675 - DNA, 447 bp, Gossypium hirsutum
  Clone ID: LIB3197-008-P1-M1-B1
cggacgcgtgggtttcatttcatagaagtcagctattccgaatcaaattgctatactgaaagaaaaggagcgaaaggcggcgataccgtccaagctgtttttcagtttttggcccttggaaaagactttggaggagaggagtggatccgctggtccgtcttgggctggctttgttcatctaacaacggctctaaggagagaaccttgtgaaaaaattagaaggggcaaagagtgtatgcaggcttttcctaaattcttgattgcatccccttcatttcacggtggtcgtggtgccctaccttcagctggtgggcatcccgcggatcttacttaccttgctggtggtgggtgctgatacaagcatctgtaagctgtgaatggagctatagtgttttattgttggtttaggaattaggactacttttatacagatggttactgtgaaat

SEQ ID NO: 49676 - DNA, 375 bp, Gossypium hirsutum
  Clone ID: LIB3197-008-P1-M1-B10
gttcatctaagtccaaggagcggtagctgcaaggttatggggaaaaagctagacgcgttgcttggaaaaaggttcaagccctacaagttgaaatcacttattagtgttgccctttctcgtctttccggtttcaagaatcggcgtcagattcgcagcaaccaagctcgctctgatgttgtggagctccttcagctcggccaccatgatcgtgctcttcttatagcggggcaggtggtgaaggagcaaaacatgttggacgtgtttgttatcctggaagggtattgtaatctcctcattgaaagactccatctcattgaggaagacagagaatgccctgatgagctgaatgaggcaatatgtggcttgctctttgca

SEQ ID NO: 49677 - DNA, 443 bp, Gossypium hirsutum
  Clone ID: LIB3197-008-P1-M1-B11
aggactttgaaaagagagtcaaagagtgcttgaaattgtcgggagggaagcggatgggggccggcgatgcgccccggtcggatgtggaacggcgagagccggtccgccgatcggctcggggcgtggaccgactcgggtcgtggcggcggcccaagcccgggcctttgatacgcccgtggagacgtcgtcgcctcgatcgtgggatttagcacgcgccgcctcggcgtgcttcggcacctgcgtgctccgggcgtcggcctgcgggctccccattcggcccgtcttgaaacactgaccaaggagtctgacatgtgtgcgagtcaacgggctagaaaacccgtaaggcgcaaggaagctgattggcgggatccctcgcgggtgcaccggcgaccgaccttgatcttctgagaaggggtcgagtgagagcatgcctgttgggaccc

SEQ ID NO: 49678 - DNA, 434 bp, Gossypium hirsutum
  Clone ID: LIB3197-008-P1-M1-B12
cggacgcgtgggtccgcttctgcctctattcctctttttgttcttcatttcctttgttttccctctccaaattactagggttttgttaagcgcagctgcgtttgacctgcctgatcggtgaaagttaaattcagcatcaactttcgtgattttaagatatattaggggatggaagttacacaggtgcttttcaatgcacaatcgattgatgggactgttcggaagaatgctgaagaaagcctgaaacagttccaggagcagaaccttcctggtttcttgctttcactttctggagagttggcaaatgaggaaaaacctagtgaaacacgtaaattagctggtttgatacttaaaaatgcattggatgctaaggagcagcacagaaaatttgagcttgttcaaagatggttgtcgttggatgctactgcaaagag

SEQ ID NO: 49679 - DNA, 341 bp, Gossypium hirsutum
  unsure (1)..(341): unsure at all n locations; Clone ID: LIB3197-008-P1-M1-B2
caagaagctatccaagcacaggttcggctgtattgctaccattgaagaacttgacagccgccactattcaagctgaagttttagtttgtggcggtgctccaaaaggatcatttgtccaagcattacaaggtaagttcgttaaagccttgaacactngcgccaggatctcaataaccgacccgaaaccaaaatgggtcttggaaactatgcctttagctagagtcatgggtgacatggtattgcttccatacggcaaagttctggtcatcaacggagcacgttccgggtcatcatgatgggacttatgatgggacccggtcttatattcagtgttatacatg

SEQ ID NO: 49680 - DNA, 422 bp, Gossypium hirsutum
  unsure (1)..(422): unsure at all n locations; Clone ID: LIB3197-008-P1-M1-B3
attctttgctgttgaagtagtaatatctatagcatacagagatggagaggcaaagaagcaagcaggtttgtttgttgatgtgggttttggttgctgcctttttctcccacaatagggtcattgcagtgacctccactggccttggtgagcagaaaaactactatccagctcctgaccctcatgctggaactcccccttcaggttcacatggcacaccaccatcttcaggaggtggatcacctccctctcatggaaccccgtcacatggaggtggttaccacccttcaccaacaccatcaacgccttcgggtggaaatcgtggaactcccccacatgacccttcaactccatcaacaccatcacacactcctnctcatggtactccaccatcatctggaggtggtagtcccccatcgtatgga

SEQ ID NO: 49681 - DNA, 441 bp, Gossypium hirsutum
  Clone ID: LIB3197-008-P1-M1-B4
gattgcgatgcgaacccaagtcctaaaccagaaagcctgaaaaacttcgagaacaaaagaaatatggcgggattgttagcatgggcggcggacgtagtcggaggccacggcggcaacagcaaccaagacgatgacttcaacaatatcccattaattttctccccagagcagcaacaatacgtgcaagaattggatcgaaaggcttcctctctcacccgtctgatccaagatctacgtctcaggttgcctcctcctgacatctcccaacgcctccctcatcttcacgcccactccctcgcttccaatgccgcccttgctctccaactcaacgctcactcttctacccgtgagcaggcccaattgcgagaggagacgttgcaacaggaaaacactgcatatgaaaatgctatatcagattgtgatggtaaaatacacgagaag

SEQ ID NO: 49682 - DNA, 438 bp, Gossypium hirsutum
  Clone ID: LIB3197-008-P1-M1-B5
cccacgcgtccgattttgatagtataatatggagaaatggtatggggtttcagggctggtgttggttttgagtttgttctttggggttaaaggagaaccccaagtcccatgttacttcatttttggagattcattggtagataatgggaacaataatgaacttcgttcattggctagagctgattacttgccttatgggattgactttgctaatggaccgaccggccggttttcgaacggtcgaactacggtggatgtcatagctgaacttttggggtttgacgattacatccctccatactcaactgcaagtggtagacaaatactgggaggagttaactatgcatctgctgctgctggaatcagagaagaaactggacaacaactgggagctcggattagtttcagtgggcaagtcaaaaattaccaacaaacagt

SEQ ID NO: 49683 - DNA, 281 bp, Gossypium hirsutum
  Clone ID: LIB3197-008-P1-M1-B6
cccactcgtccggccgtatccacgagaagcgacttttggacctcaatctctgtctttgtgtttctctgttttgtattattttttcctttgtgtcatcaatggcgagcagatactgggtggtgtctcttccggatcagaactcaaccttcactttttatatctttcatgatcaattctccatgcattctttcttctctcctctctaccgattcattttacccaatctccgagttgttactactgattcctttcttgctcttagcgttaacctcttgtatttt

SEQ ID NO: 49684 - DNA, 335 bp, Gossypium hirsutum
  Clone ID: LIB3197-008-P1-M1-B7
gtcgcctcattttcttcactcgttcaggctttggttggttttgttggtattgaaaatgcttgctcggctcgcgtctcgacgttttctcgagatccgtcaagctttccgtcaatcttctgaggcctctcgatctttgtccactgccctgaactatcatcttgataccccagataataatcccgaccttgcatgggaattttccgaggcgaacaaacaaaaggtcaaggagatattatctcattatccatccaactacaagcaatctgcagttattcctttgctagatcttgctcagcagcagcatggaggatggcttccagtttcagcaatgaatg

SEQ ID NO: 49685 - DNA, 351 bp, Gossypium hirsutum
  Clone ID: LIB3197-008-P1-M1-B8
ggtgaagcgggtgcgcgtgccggtaccgaattgcaatttcggcccagacctacgcttctttgttgatcaagtgcgcatacctataggatacagatatggagaggcaaagaagcaagcacgtttgtttgttgatgtgggttttggatgctgacctttttctcccacaatacggatattgcaaagacctccactggccttggtgagcacaaaaactactattcagcttctgaccctcatgctggaactcccacttaaagttcacatggcacaccaccatcttcaggaggtggatcaccttcctcttattggaacccgtcacatgtaggtgggttccaccctttagcaacacca

SEQ ID NO: 49686 - DNA, 362 bp, Gossypium hirsutum
  Clone ID: LIB3197-008-P1-M1-B9
gttctattcttttatattatgcatttccatatgtgtggaattcatcatgttcgaggggagtatacaatggcaggtcggggtaaaactcttggatccggggcctcgaagaaagcgacatctaggagtagcaaggccgggcttcagtttccggtgggtcgtatcgctcggttccttaaggctggaaaatatgctgaacgtgtcggagctggagctcctgtttacctagctgccgttcttgaatatcttgcagctgaagttctcgagcttgctggaaatgcacccatagacaacaagataacccgcattgtgccacattatatgcagctcgctgcgaggaacgacgaataactgaacaaactact

SEQ ID NO: 49687 - DNA, 403 bp, Gossypium hirsutum
  Clone ID: LIB3197-008-P1-M1-C1
gttccattcctttatattttgcattttcgtatttttggaattcatcatcttcgttgcgagtatacaatggcaggtcggggtaaaactcttggatccggggcctcgaagaaggcgacatcgaggagtagcaaggccgggcttcagtttccggtgggtcgtatcgctcggttccttaaggctggaaaatatgctgaacgtgtcggagctggagctcctgtttacctagctgccgttcttgaatatcttgcggctgaggttctcgagcttgctggaaatgcagccagagacaacaagaaaacccgaattgtgccacgtcatatccagcttgctgtgaggaacgacgaagaactgagcaaactacttggagatgtaacgattgccaatggaggtgtgatgcccaaca

SEQ ID NO: 49688 - DNA, 252 bp, Gossypium hirsutum
  unsure (1)..(252): unsure at all n locations; Clone ID: LIB3197-008-P1-M1-C10
ttcttttatatgatacttccccctaaaaccagaggtgctcttctattatcagaaaatgcgnccccacccatacaattactccaatcttacacaatttaacttatttataccctaccccccactctttattaaacataaaaaaaacacctcttattatctttcctaataaattcccatccaacactagatatttcaaatccaatctaatttctttacacattaattatacattacatcaaatcctactttttt

SEQ ID NO: 49689 - DNA, 333 bp, Gossypium hirsutum
  Clone ID: LIB3197-008-P1-M1-C11
taataacatccctcttttttattcctaaaggaaacgtatagctgttattattacttatatgactggccaactaatgctgcttaagaagcttttgataaagcctattttaccaaaacccataatactaatgctcgaacttaaacttatataacaatgtttgacaactattattttttttacaaatttgttcaaaaccttcacttttttttttccggatgtgtaaattaaaaccataacatttttgccacaattctccaatgatttttttatgcttattgacctcctcttataagcacttatgacataaagaatcattgttatcctgtatcttat

SEQ ID NO: 49690 - DNA, 348 bp, Gossypium hirsutum
  Clone ID: LIB3197-008-P1-M1-C2
ggtctatccatctatatcttatttatccaacccatatttcatctcgtctttttttatttttttttgggaaccaaatctatctttagggttttaattcaatcattcattgttatttcacaaaggaatgacgactgctaaaaaaaacatgttacctcctggtttggttaacaatctccaggaagttcttcttagcagaaaaggcggaaactccaacaccaataacgatgaacaacaacaaaaacccgacgccattactgattctactgagacatctacttctgcttctgatgaaaacgacaactccaagcctgtcgttttggttaccaacggtgaagggattgattcact

SEQ ID NO: 49691 - DNA, 438 bp, Gossypium hirsutum
  Clone ID: LIB3197-008-P1-M1-C3
ctgcttgattgcgggggttggaatgagagctacagctgcttatatctacatcaggggtgaatatgtgaatgaacgtaaaaaccttgaaagagctagaaaagaagcttatgaagctggactattgggcaaaaatgcatgtggttctggttatgattttgatgttcacatccattatggtgctggtgcctatatttgtggtgaagaaacagcacttttagagagccttgaaggaaaacaagggaaacctagattgaaacctcctttccctgctaatgctggattatatggttgtcccaccactgtcacaaatgtggagacagtggctgtttcgcccacaatactgagacgtggtcctgagtggtttgccagttttggaaggaagaataattccgggacaaaaattgtttgtgtctcaagtcatgtcaacaagccttgcac

SEQ ID NO: 49692 - DNA, 421 bp, Gossypium hirsutum
  unsure (1)..(421): unsure at all n locations; Clone ID: LIB3197-008-P1-M1-C4
cattttcaagcaatggcaatccccatgggaccggctgtccgttagttttatctgataatgctcctgcaggcatacagggagccaggcatgctcaatttgggttatctgtatccgacctccatcttaataataaactgcagtccggactttttctgcccggtttccagcggttcgatccccactctagaatttccgatggcatcatgatggcaaggcgccctaatggtactgataatctttcttgcttgttaacaattgggaattctaatgtgaatgagaaatctggcaacacanaaagacaccagtttttactctttggtcagccgatacttactgagcaacagctctctcgtagctgttcaagtgaagttgtctcacaagttattaacgganatagttcgttagatggaagtgccgaaaa

SEQ ID NO: 49693 - DNA, 338 bp, Gossypium hirsutum
  Clone ID: LIB3197-008-P1-M1-C5
agttccgacaaaagaaaacgaaaaaaaagaagaagaaatacaatcgttttctttttgaagtcgggttttagtttttggggtgaaaaaaatgttgggagtatttagcagtgcgatagtgtctccgccggacgagctggtggcggccggttgccgaactccatcacctaagataacggcggacgctctggtgaaacggttccttgagacgaactttcttcgcgtgttcatgcacttcggtgaccatgtccaattcgcttattctcaccattaagagttttctttacagcccagatcatttgctgtgaaagaacaaatcttttgcttggttgagggagccc

SEQ ID NO: 49694 - DNA, 182 bp, Gossypium hirsutum
  Clone ID: LIB3197-008-P1-M1-C6
attttcccgagaaatcttgccaaacaaagaaaaaaaaggaaaaatggagttatgccctacaattaagaacatccttcttttggattccgaagggaaacgtatagcttgtaagtattactcaaatgactggccaacgaatgctgctaaagaagcttttgagaaagctgtgtttaccaaaaccc

SEQ ID NO: 49695 - DNA, 402 bp, Gossypium hirsutum
  Clone ID: LIB3197-008-P1-M1-C7
cggacgcgtggggccatggcaagtatatggcttgctgtttgatgtaccgaggtgatgttgtgcccaaagatgtcaatgctgctgttgccaccatcaagaccaagagaactattcagttcgttgactggtgcccaactggattcaagtgtggtatcaactaccagccacccactgtcgttcctggtggtgatcttgctaaggtccagagagccgtttgcatgatttccaactcaaccagcgttgctgaggtgttctcccgcattgaccacaagtttgatctcatgtatgccaagcgtgcctttgttcactggtacgtgggtgagggtatggaagaaggagaattctcggaagctcgtgaggaccttgctgcactcgagaaggattatgaagaagtcggtgctg

SEQ ID NO: 49696 - DNA, 360 bp, Gossypium hirsutum
  unsure (1)..(360): unsure at all n locations; Clone ID: LIB3197-008-P1-M1-C8
cttttatttttctatattttattttacaatgcggttgctttttctacatgggagatgagtttttnaatccacatctaaaccttgaaatatcattcaatcattcatttttatttcacatatgaatcgacaactcctaaaaaaaacattttaactcctgtgttgacttacaatctccagcaagttcctcttatcataaaaagcagaaacttctacaccaataacgatgaacaacaacacaaaaacacccaccattataccttcttctcctacttatactgtatgatatgattaaaacaccaccttcacacctattgatacagttaccaactttcccacaatacattcacatggtcctgttta

SEQ ID NO: 49697 - DNA, 443 bp, Gossypium hirsutum
  unsure (1)..(443): unsure at all n locations; Clone ID: LIB3197-008-P1-M1-C9
attgctaacatttcgttgggtatggtttgggatgtcaactaagtagaagaaaacatcagaaagaagaaaaaaaaatgggaattttggcaggcataggggttttgttgccattcccattttactacttgttatggacatatccacagtcatgggtgaacctttgtgggaaaggaagggacccatcaaaggtgatggcccttgtctcccatttcatcaagctaattcagttcgtttctctcttttccgtttcttccttctcttggcctccccctctttacttttggcccctctttgccttcggtcagttcctcaacttcagggtgtatcaattgcttggtgaatctggaacttattacggtgtacgctttggaaagaatattccatgggtaagggaattccctnttgggttcattaaagatccacagtatgttgggagcatcatg

SEQ ID NO: 49698 - DNA, 354 bp, Gossypium hirsutum
  Clone ID: LIB3197-008-P1-M1-D1
cccacgcgtccgatttttagagaactatcttctttatttgccgaaacttcaaacaaagggaggaatatgtttttggattggaggtgctcaaagaacaaagataaaaacttgaatgagatcatgacttggcttgagtggatcttatctcacacgcttttgcgtactgctgagagcaacccacaaggtcttgataatttctggcttaagcaaggggcagcattattgctaagcttaatgcagagctcacaagaggatgttcaagaaagggcagccactggactagcaacttttgttgttattgatgatgaaaacgcaagcatagatcgtggaagggctgaagcagttatgcgagat

SEQ ID NO: 49699 - DNA, 423 bp, Gossypium hirsutum
  unsure (1)..(423): unsure at all n locations; Clone ID: LIB3197-008-P1-M1-D10
ggaaagcggccgcctgcatgtcctttcctaatttccggtcaacccacccgttctctttattcttccaagcatcactcctttgggggggttgttcacatggtggggttaaacaatttaaaatattcanctctncccttttctaatgctatgatttaaacttcaccttacccaaatttgaacaaatccttaaattgttctttttcttcattgctttcccaaaatttagtattcatgtacgctccatattattgcctcttcttatacttttttccgaacaatttctttttatttctaaggcttcagacttttcttccacccaccatatcccgaaaaaacaaattttataaccctttccaccattttttttcccttctttcctttttaggaatcaattaaagtttttctttttgggaaaaatttttt

SEQ ID NO: 49700 - DNA, 430 bp, Gossypium hirsutum
  unsure (1)..(430): unsure at all n locations; Clone ID: LIB3197-008-P1-M1-D11
caatttcctcccaagcatcactctgtttggtttcttggtcagtttctgttattaaacaatggaaaagattcagcacagccatgtccaagtgcgaggattaaagcttcacgtagcccagattggaacaggtcctaaggtggtgcttttcctgcatggcttcccggaaatttggtattcatggaggcaccagatgattgctgtggctaatgctggtttccgagcaattgcttttgattccaggggctacggactctccgaccacccaccggagcccgaaaaagcaaatttcaaggaccttgtcgacgatgttgttgcccttcttgacttgttgggaatcaataaggtttttcttggtgggaaggattttggagcagtgcctgcatttatggtagctgntatccaccctgaaagggtgtaggtgtcataacac

SEQ ID NO: 49701 - DNA, 439 bp, Gossypium hirsutum
  Clone ID: LIB3197-008-P1-M1-D12
cccacgcgtccggaacaactctacctcctggaccccttgttgattttcgatctcctcagatctgctgtggaatccacaccatatgcctccggttcttttcattttagttttccactttatctgaatagtcaatatgggaggagggttcagagtactgcatctggttagaccatttctttcatttctgcctgaagttcagagtgctgacaggaaaattccttttagagagaaggtcatctgcactgtcgtctctctcttcatctttttggtgtgcagtcagcttccactatatggaatacactctacgacaggtgctgatcctttctattggatgcgtgttatccttgcatcaaaccgtggaactgttatggaacttggtattacccccattgtgacatctggattggtgatgcaactcctggctggttcaaaaatcatc

SEQ ID NO: 49702 - DNA, 408 bp, Gossypium hirsutum
  Clone ID: LIB3197-008-P1-M1-D2
cttaaaccttcgtctgtaaacttccatttttgactctgaaaaaaaaaaaaaaaaactgcgtttagtctccatttctgtctttgaagcttaaattttggaccaattaggctttttttttccttgatttgagatttgggtttcttctcctttcttcttttttggttcagcagcagcatgcggtggtggttcagtcaatcggttgatgtggttcgaaaagtcatctctttgaacttggatcgcagagtgattctgtaattccccccataatcagcaaacaaagccctttttttagccattgactctttagtcttacactattgtatatatatcttccatgggatccactttcttcattgacgatccttgttatggtcgtcagattagccgattagtgaatcatcttcaaaa

SEQ ID NO: 49703 - DNA, 304 bp, Gossypium hirsutum
  Clone ID: LIB3197-008-P1-M1-D3
ccatatgtcatatgatcgtgatttggcactagatcgttggtgggtttactctcttttttcgctttattttatcggatctgaaggttttcttatggctgttttgtattgaaacaaaaattctatctgttcttttataattcatcaaaatattgccggtgatatgccccttatttgtttattcctaaaagggtatgattttctttctgggaaacttaattttttgaagtgaggggtttaccatgatttggtttgctatctcttaacaataatgatggtggcaggtgggaccactgtgattgggggg

SEQ ID NO: 49704 - DNA, 429 bp, Gossypium hirsutum
  unsure (1)..(429): unsure at all n locations; Clone ID: LIB3197-008-P1-M1-D4
ctcgaaacccaccattacggcaaatggcgacgacggtcaccggcaacctgagccgcgatcagtacgtttacttagcgaagctatccgagcaagctgagcgctatgaggagatgcttcagttcatgcaaaagctggtcctcggctcaaccccagccgctgaattaaccgtcgaggaaaggaaccttctctccgtcgcctacaaaaacgtcatcggatctctacgtgccgcgtggagaatcgtttcttccatcgagcagaaagaagaaggtcgaaagaacgaggaacatgttgtgctggttaaggagtacagatccaagattgaatccgagttgtcggaagtttgcgctagtatcttgactntattggagtcgaatctgatcctctctgctactgctagtgagtccaaggttttctatttgaggatgaaag

SEQ ID NO: 49705 - DNA, 449 bp, Gossypium hirsutum
  Clone ID: LIB3197-008-P1-M1-D5
ccatgcgtactggctagtgtagctagcccagcttcttttccaggcttgaaaagcaaggacccaggcttatgattcactaaaagtacggatcttgtgaggatatgtgatttgagaaggaccaagactggttgaacacgaatctctgtgattcggaatcacaatcccagtcacgatactgctcaacttcatgctggatccaaatgaatccctttgctaatgccgaggcacaagcattgggaatccatacacaaaactgcgaggtgtacaaccacgacccggatgcccaaaaatcgaactcttggtagcgagcatccaataaggattcaaacaatgactacgaccgacactaaggatgtggctgggacagttgaacaggtgatgagaatagcagacaagggagcggatattgtccggataactgttcaagggaagatagaggcagatgcatg

SEQ ID NO: 49706 - DNA, 228 bp, Gossypium hirsutum
  Clone ID: LIB3197-008-P1-M1-D6
agttgctctaactacctccgcctgtctttcaacgagaggtgaacaagaaaagagactaagaaatgtcacgcaagaaaatcacagagtacgactccaagagattgcattatcatcactcaatttatctgaacagctactattggaggagggttctgagcactggatctagttagaccatttctttcatctctgcctgaaggtgacagggcttacatgaaaattactttt

SEQ ID NO: 49707 - DNA, 439 bp, Gossypium hirsutum
  unsure (1)..(439): unsure at all n locations; Clone ID: LIB3197-008-P1-M1-D7
attttcagaacattgaagatctaaacattttttcttctttctgagttgaatccaaagatgggtttttgtttctgggtttgttttatttgtttgttaaacttctacagcttgagttttgtaagttcacaagctgatgcaagtgctgaagggactgttttcattgatggaaaagctccgattggtagaatagatgatgatttcatttgtgctactttggattggtggcctcctgagaaatgtgattatgggacatgcagttggggccttgctgggcttctcaatctggatcttaataaaaacttattcttgaatgccgttaaagctttttcaccattgaagattangttgggcggcacattacaggacanagtcatatatgacactgatgacaatcaactaccctgcacttcatttgtcaaaaacacttctgagatgtttg

SEQ ID NO: 49708 - DNA, 139 bp, Gossypium hirsutum
  Clone ID: LIB3197-008-P1-M1-D8
acccacctttcttttttcaactaatctccctttttagttggttcttaaaaaaaagagcgtttttttcttttttttttaaacttaaattatacccatatcactttttttccttactaaaattaatttctttctttttttt

SEQ ID NO: 49709 - DNA, 168 bp, Gossypium hirsutum
  Clone ID: LIB3197-008-P1-M1-E1
ctgcatttgtttgctatctgctctattatgaatataaatgtataactggaaaaaggatagacttttttcacttaaccaaacctcagcctcatcaattcaccatattggtacgcagtatacctgtttctgctggaagtaatgttagtgagagtgttgaaagatttttca

SEQ ID NO: 49710 - DNA, 346 bp, Gossypium hirsutum
  Clone ID: LIB3197-008-P1-M1-E10
cttggtttggccaccttgatgggcaataggaaagaagaagcatcaacttagagacgttgattcacaccgaaagggtgatggaactgagcattcataaaatataatcctcgattacgctaaacatcgatatggtgatgaccactacaactgggataattgaggaggattatcaagcagatgtcatcgtctacgatcaaaagaaagctgatttcaaggatgagcgagctcttgatggattgctgtatatcactatattggctgctgcttactatctacttcaactatgatgcacttcattctcagcttgttacaaacgaacctgactaccatcgtacgcatatctggc

SEQ ID NO: 49711 - DNA, 450 bp, Gossypium hirsutum
  Clone ID: LIB3197-008-P1-M1-E11
atcgttcagttgatgacctcttgtcatttatgaatggagatgatggagattctaaagggattaaaacttcaaagagtaaaaagaagaaccgaagaagaaaagatttgcagaagagcacgtctgctcatgaggccactaaaaaccataataaggagtcaaatggtcttaactctgtatgccgtagtgctgaagttcgtcagattctgcccagtgttggtgctaccacaaacttacaggatgtcgaagatgatatttttcccaataagaacgagtttgacgatggtgatattgatgatgagattgatccgacattgaaggaaaaaattgatagggaggtggaagattttgcccgtagattgaattcagattggccggaaagaatgcaagaaattctctctttaggccaagaaaagaaaccagtgcatttgtcacttaatggcaagggttcat

SEQ ID NO: 49712 - DNA, 407 bp, Gossypium hirsutum
  Clone ID: LIB3197-008-P1-M1-E2
aattccctcccctaactctctgccctctcactgggactcaatcacttcatgcagaacaaaaaccgaaaacaacaaaaggaaaaggagaaataaataaataaataaatgagctccagcaattaaataaaaaaaaacaattaaaaaatttctatcattttagctttcgttcatacttcataaggcctttctctttccctctcttggctgcgactttgagctttttgttacctgaaaagctaaaaaagaattgggatttgttgctttaaagctctttttttaacgaggagattcgtcattgctctaagcgtttaatgattttatctctctctctttttcacctctgatcctctgttatttcgttaagtttcttcgtatttcactgttcaatgtgctgccgaacgaggttc

SEQ ID NO: 49713 - DNA, 451 bp, Gossypium hirsutum
  unsure (1)..(451): unsure at all n locations; Clone ID: LIB3197-008-P1-M1-E3
atcgctctctctctctttcagttcacttctacaggcttctcttgtccaccaatcggaaaaaaccaaagatgcagtacaaaaacctgggcagatcacgcttaaaggtgagtcaactatcgtatggagcatgggttagtttcagtaaccagctcgatgttaaagaagcaaagtcacttctacagtgttgcaaagacaacggagtcaactttttcgacaacgccgacgtttatgccaatggtcgagccgatgagatcatgggtcacgctattagggaacttgggtggaaacgatcggatatcgtggcttctaccaagatcttttggggtggtcctgggccaaatgataagggttcgtctagaaaacatattgtggaaaggaaccaagcgtgcttgaagaggctngatatggattatgttgatgcgctctattgtcatagggcagacacacagac

SEQ ID NO: 49714 - DNA, 384 bp, Gossypium hirsutum
  Clone ID: LIB3197-008-P1-M1-E4
cttggtttggccactttgatgggaaaaaggaaaaaagaggcagaaatttagagaagttgattcaaacagaaagggtgatggaactgagcattcagaaaatagaagccttgattaggctaagtacgatagtgatgttggttttaacagcttgtttaattgggttggattctcaaacaaaggtcatcttctacgttcaaaagaaagcttctttcaaggatttgcgtgctcttgttggattgctgtatatcacttcattggctgctgcttataatctacttcaactatgctgctcttcattctcagcttcttacataggaacctcgctgcatatcttacgcatatctggcttggcttcgttatattttggatcaagcagcaatgtac

SEQ ID NO: 49715 - DNA, 403 bp, Gossypium hirsutum
  Clone ID: LIB3197-008-P1-M1-E5
caccggtcaataccatcacccatgaactcttgagcttcatcgccggcgataatgggaagtctagaaaggattaaaacttcagcatcccaccagaccagcagcgtcttatcttcgccggaaaacagctcgaggacggccgtaccttggccgattacaacattcagatggaatccaccctccaccttgtcttacgtcttcaagggggaatgcagatctcagtgttggtgctaccacaaacttacaggatgtcgaaaatgatatttttcccaataagaacgagtttgacgatggtgatattgatgatgagattgatccgacattgaaggaaaaaattgatagggaggtggaagattttgcccgtagattgaattcagattggccggaaagaatgcaagaaattctc

SEQ ID NO: 49716 - DNA, 446 bp, Gossypium hirsutum
  Clone ID: LIB3197-008-P1-M1-E6
cggacgcgtggggtactggacatgtccagcactgacacactgttacttctatggtcaaaatggctgaagaaacagttaagcgagtgactggccttaaccccgttcttctatctaggcccagtgtacctagtgtacccgtgccttttgttagcagcccattggaatcatccacaggttccatgccattgccgccgaacactagtaagctatttcaccaaccagttcctgacattgctgctcccatccatcacccgagactagacaacagtttcacaggcaacaacctggttactcctatcgtgaatccacaaaccgaaataggagtggaaaatgttaacaaaacatctgcattgcagcatacgccgagaggcgtgcaaaagcagattggcccttgtgtgagtccatgcgtgcccatgcctggctgggaacccggactaccccatggg

SEQ ID NO: 49717 - DNA, 434 bp, Gossypium hirsutum
  Clone ID: LIB3197-008-P1-M1-E8
tctaaagtcacacctgctacacgacagatggggcatgaccttccacgaacatggcgcggtcacccttggttggacacaccacatggccatgcagctctccggcgtgtgcttgtggggtattcttttcgtgattctgatgtggggtactgtcaggggttaaactacgtcgcggcattgttattgcttgtaatgaaaacggaggaagatgcattttggatgcttgctgtactccttgaaaatgtcctagttaacgactgctatacaaataacttatccggatgccatgttgagcaaagggtttttaaagatttgctttctaagaagtgtccaaggattgctgctcatttggaatcgttagatttcgatgtcttcctcgttactacagagtggtttctatgcctttttgttaaatgcttgccttccgagacaactct

SEQ ID NO: 49718 - DNA, 337 bp, Gossypium hirsutum
  Clone ID: LIB3197-008-P1-M1-E9
ccaatttccacccacacccacgcattcttttttttatcctacaaatcacaaacaaggcgaggatttcacaaagatcaagaagggggccttcttccaataataaaatacatttatttataacacaaccatatacttcttctaaaaacaccattttttacaatctcatattagtataaataattaccacaaaaacaaccactatttttaatatttttacataggaatacaaaaacatcatcttttctattttttattctattctccaaaacaatattttaccattagcaaatacttttatttcaaaacacacaaaaaactcatttttattatttaatat

SEQ ID NO: 49719 - DNA, 449 bp, Gossypium hirsutum
  Clone ID: LIB3197-008-P1-M1-F1
atcgctcatatttctcgcagacgtgaagaatggggctgtctttcacaaagctgttcagccggctttttgccaagaaggagatgcgtatattgatggttggacttgatgctgctggtaaaaccaccattctttacaagctcaagttgggagagattgtcaccacaattccaaccattggtttcaatgtggaaactgtggaatacaagaacatcagctttactgtctgggatgttggtggccaggacaagattcgtccattgtggaggcattacttccaaaacacacaaggactcatttttgtggttgatagcaatgatcgtgatcgtgtggtcgaagccagggatgagttgcacaggatgttgaacgaggatgagttgagggatgctgtgctgctggtatttgcaaacaagcaagatctttcaaatgctatgaatgctggcgagatcact

SEQ ID NO: 49720 - DNA, 404 bp, Gossypium hirsutum
  Clone ID: LIB3197-008-P1-M1-F2
ctctttttcccctaattgggtcatccttcttttatatatctgtcttggggataaatggttgatatatttggtgtttatgttattacttattaggtcataacatagaggaaatgcttatggtttgaaagttgctgcattttgataagagaaaaggaatggcttcttcaatcggttttattataatttttcctatatagtttctgttcagaatgaggcattgttaccacctcaatatggaatttcattgaccatttgtaggctaattaatatatgaattcaatggcaagagtaaaatgtaaattcagaattcagatgatgaactgcaatggtgtgtatatggatttcatgacagttctgctatctatttatatgatagttcaatcattgaaaataaagttctcttg

SEQ ID NO: 49721 - DNA, 433 bp, Gossypium hirsutum
  Clone ID: LIB3197-008-P1-M1-F3
tttcgattttctatttagttttctcttcctcgagttaagatgcagatcttcgttgagaccctgaccggcaagaccatcaccctcgaagtcgagagttccgacacgatcgacaacgttaaggcgaaaatccaagacaaggaagggatcccaccagaccaacaacgtctcatcttcgccggaaaacagctcgaagatggccggaccttggccgattacaacatccagaaggagtccaccctccatctcgtcctccgtctacgtggtggcatgcagatcttcgtcaaaaccctgaccggcaagaccataactttggaagtcgaaagctctgacaccattgacaacgtcaaggccaagatccaagacaaggaaggcatcccaccagaccagcaaaggctcatctttgccgggaaacaactcgaggacggtcgcacct

SEQ ID NO: 49722 - DNA, 381 bp, Gossypium hirsutum
  Clone ID: LIB3197-008-P1-M1-F4
ggaaatgccttgggaaacaatggaactaattggggttcttctgccatttccggtcaaggtggaagggataacatttctggcaatagtgtgaattttggcaatggaaatggtgataacaactttgggttaggaacagcagggtatgagagaaacattgggaccaatgtggtaccagcatcatcatatacagcatcgaacggtggttatgatatatcctttgcaaaccttcctgcaagtgcttccatttatggggataccacttggcaatcatcaacatctgtgcgagacagttctggtactttcggctatggacttgatagtgccacttctgatgttacgcgtaaaagttctcctggttttgtggtggttataatgttaata

SEQ ID NO: 49723 - DNA, 401 bp, Gossypium hirsutum
  unsure (1)..(401): unsure at all n locations; Clone ID: LIB3197-008-P1-M1-F5
cttccattagacccaaaatgccgcttcactcggcggtagcattgttttatgccgccgcttctcttttcgccattgttggcgccgaagatccctataggttctacagctggaatgttacgtacggtgacatttaccctcttggcgttcgtcaaacgggtcttctcataaatgggcaattcccaggccctgatattcactctgttaccaacgacaacctcatcatcaacgtctataacaacttaaacgaatcttttctcctctcctggaatggagtccaacaaaggaggaactcgtatgaagacggcgtgtatggcacaacctgccctattccaccaggaaagaacttcacatacatgcttcangtgaaggatcaaatanggagtttctattactacccatca

SEQ ID NO: 49724 - DNA, 422 bp, Gossypium hirsutum
  unsure (1)..(422): unsure at all n locations; Clone ID: LIB3197-008-P1-M1-F6
ctaaacggccaatagaaggatctagaaacactactgaagcattttctatataataatgtcgttacgcgctacttattgtctcagtaatttctcttcacctgaatataatcttttgcttacggtttttcctgcgtgctcttgaattggggttttgagttattctcaatggcggacacagagacgtttgcttttcaagctgagattaaccagcttcttagtttaattatcaacactttctacagcaacaaagagatctttcttcgtgagctcatcagcaacgcttctgatgcatnggacaagattagattcgagagtttgacggacaagagcaaacttgatgctcaacccgagctgtttatccacattgtccccgataagacatacaatactctatcgatcattgatagcggtattggcatgac

SEQ ID NO: 49725 - DNA, 389 bp, Gossypium hirsutum
  unsure (1)..(389): unsure at all n locations; Clone ID: LIB3197-008-P1-M1-F7
gaaaagtctgtattcgtcttgtcatttcatctggcattgctttggaaagacggttgcagatttccaaggaaaggattntgctccatgcctattgatcttttttctttttcctttcctttttccttccttgcttcattctgttctcaatctgattttcgctcttcttttccattttaaaagattttgtaaaatcatgtatgtttcctgatgtagagatcgccttctccttctttagcattgcagatggtgatgattctatttccagatgtttcatctccattcccgatctattttcgcttcagtaataccctttccaacgtatacaggagcaacggatgtatttttgtctattttaacccttctgatgcccgattgtgtggctgctacat

SEQ ID NO: 49726 - DNA, 393 bp, Gossypium hirsutum
  Clone ID: LIB3197-008-P1-M1-F8
ttctcggtggttatgatagagatggtcctcaattatacatggttgaaccatctggcatctcttatagatactttggtgctgcaattgggaagggaaaacaagctgccaaaacagaaattgaaaagttgaatctgtccgaaatgacatgcagagaaggggttattgaagtagccaaaatcatctacaaggtacatgatgaagcaaaggataaggcctttgaacttgagatgagttgggtctgcgatgaatcaaagcaacaacatcaaaaggttcctgatgacctattagaggaagccaaggttgctgctaggactgcactagaagagatggatgctgattaaattgtcagtgaagccagaatagtctttgctattgatattctcatctacatga

SEQ ID NO: 49727 - DNA, 206 bp, Gossypium hirsutum
  unsure (1)..(206): unsure at all n locations; Clone ID: LIB3197-008-P1-M1-F9
ggtaaaactcgtacgcctgccgtaccaatccccactttccacccacacccacgcattctattctctaaaagaattaaattntttttcagaaattttccattaattatctaggaatccccacatatatttcctttaatcttttctcaattaacttaaaaccctctttcttcaaccaaaaaaaaaatctatcatatgatcggacttcc

SEQ ID NO: 49728 - DNA, 421 bp, Gossypium hirsutum
  unsure (1)..(421): unsure at all n locations; Clone ID: LIB3197-008-P1-M1-G1
aaaaaattgactaaaaagcttcaattttttttctttgttttgcttctgtttctctttgaattcccaaatgggtttgtgggaagcttttctcaattggcttcgaagcctgtttttcaagcaggaaatggagctatctttgatcggacttcagaacgcgggaaaaacctcactagtaaatgttgttgcaactggtggatatagcgaagatatgatccctacggtcggattcaacatgaggaaagtgacaaaaggaaatgttactataaaattatgggatctcggaggtcaacctaggtttcgtagcatgtgggaacgatactgccgtgcggtttcggcaattgtttacgtggtggatgccgctgatcccgataacttgagcatctcaagaagtgagcttcatgattngctgagtaaaccctca

SEQ ID NO: 49729 - DNA, 117 bp, Gossypium hirsutum
  unsure (1)..(117): unsure at all n locations; Clone ID: LIB3197-008-P1-M1-G12
gctttatgttaaaactagcttttattcctgtattcaagctttccaagacagagcttcatattttcttttgtcggancnatttaattttttgttttattttgtttttttattcaattt

SEQ ID NO: 49730 - DNA, 457 bp, Gossypium hirsutum
  unsure (1)..(457): unsure at all n locations; Clone ID: LIB3197-008-P1-M1-G2
cccacgcgtccgctttcttttacaaattccaagctcccaattagggttcttcatttctcaaaggtttaacgtggttaatttttaagatactttgtggtggacaaaaagttgatagaaagctatgttactaaacctaagcattatctaataagaatgccgggcattcctttagtggctcgtgaaacctcctcttattttagaagcacagatcagatgtgccgagaagattcccgcctgcatttatctgcagaagaggaaattgctgctgaagagagtttatctatttattgcaagcctgtagaactctataacattcttcaaagacgtgctgtaagaaatccttcgtttcttcaaagatgtttgcgatacaaaattcaggcgaaacacanaatgagaatacaaatgtcagtgtccatatcaaggattgtgaatgagggtgtactgactcaaagtcttt

SEQ ID NO: 49731 - DNA, 447 bp, Gossypium hirsutum
  Clone ID: LIB3197-008-P1-M1-G3
taatttttctttttcttttattttcttctctgtcccatccctcccccttctagaaaacagaaaagtaaatcaatcactccaaaatttatctcatctgcaggtactgttatatgatgctgtgggaggcagggtaccgaatgctgtagagtaataaagaagttgctatttcttctaggaaataattgcaaggaaagaaaatgaagagtaacatgtccaagattaatatgtgcaacatcaacatgtacaacatggatatgtgcaacatgaacatgtacaggattgacactaactgcagttctaggatctcaacttttatgagactgttcctgtagttcgagagaaggttagactttctattcgtttttacggcagaactattggttttaaacctgttgatagggattgatctaggcagaaatggaagcaccgaacgccatgctattggat

SEQ ID NO: 49732 - DNA, 413 bp, Gossypium hirsutum
  Clone ID: LIB3197-008-P1-M1-G4
cttggaaggaaaaaggcgatgttgatgttgccattcggtactatatgattgcaattgagcttcgccctaactttgctgatgcatggtcaaatttagctagtgcttacatgcgaaaaagaagatttaatgaggccgcacagtgttgccgtcaggctctgcaattaaatcctctattggtggatgctcatagtaaccttggaaatctaatgaaggcacaaggtctggctcaagaagcatacagttgttatcttgaggctcttcggatacagccaacttttgccattgcatggtcaaaccttgccggtcttttcatggattcaggtgacttaaatcgagcccttcagtattacaaggaagctgttaaactcaaacctgcgtttcctgaggcttatttaaatcttgggaatatttac

SEQ ID NO: 49733 - DNA, 259 bp, Gossypium hirsutum
  Clone ID: LIB3197-008-P1-M1-G5
cccacgcgtccgcccacgcgtccggcaaaaccatgcagataagactaagaaaggggcatatttgtttagatgatgcatttgaatttggaaactgtgtttgtcattcttcaccagtggggtataaaaactactatgcttttgtttatttcttcaggcttgtttcatgacgagcccatgttgatgttgccattgttgttcatctaggctttgtaatatatacatatttggattaaaaaaaattagggcctgttagtttccc

SEQ ID NO: 49734 - DNA, 405 bp, Gossypium hirsutum
  Clone ID: LIB3197-008-P1-M1-G6
cggacgcgtgggtttttcttttgctcgatctgaatctggttaaaataacagaagaacaatggaagagctgaaatcagctgtggaggagcacatggaattaatggcggatctagttcagaagctatcctcggagcttcgttcgggcctccgacccgcctatgataactttatgggcttcttccatgcaatcgactggaaggagccatggttaatgtgcttactggcattccatgttttcttattgatagtaacaatcttctcgaggaagaatactaacttccagatgtgtttgttccttctagcattgctcggtgtttattttgcggagttactgaatggattccttggtgacaactggaagaaatttgcaaaccagaactattttgatccaagtggaactttttt

SEQ ID NO: 49735 - DNA, 448 bp, Gossypium hirsutum
  unsure (1)..(448): unsure at all n locations; Clone ID: LIB3197-008-P1-M1-G7
cttcgattccaatagagataganagagaggaggagatcttcgcttctctgggtcggtctgctccatttgataaccgcttgcagctctctcagtgcttgacagacgtgaaaaatggggttgtctttcacaaagctattcagccggcttttcgccaagaaagagatgcgtatactgatggttgggcttgatgctgctggtaaaaccaccattctttacaagcttaagttgggagagattgtcactaccattcctaccatcggtttcaatgttgagaccgtggaatacaagaacatcagcttcactgtttgcgatgttggcggccaggacaagatccgaccattgtggagacattacttccaaaacacacatggacttatttttgtgggtgatagcaacgatcgtgatcgtgtggttgaagctagatatgaattgcacaggatgttgaatg

SEQ ID NO: 49736 - DNA, 318 bp, Gossypium hirsutum
  unsure (1)..(318): unsure at all n locations; Clone ID: LIB3197-008-P1-M1-G8
cttccttttacaaattcccagggcagaaatacttttctatagataagtaaaacctttaccttttctttttttaaaaaactttctntttgaccaaaattttattaaaaactttttttcttaaccccaaccttaatctaataaaattacatacccttcctttatacttcataaacctccacttaattttataatacatctcatattctcccataaaattcccacctacctttattcttcataaaaaaaaatatctccttcataaaattatctatttatttcaaacctgtaaaactctattacattcttcaaaaaccttct

SEQ ID NO: 49737 - DNA, 304 bp, Gossypium hirsutum
  unsure (1)..(304): unsure at all n locations; Clone ID: LIB3197-008-P1-M1-G9
acctcccattttcttttctacccaaacttgtttccttcaagagccattccttccttcgactaagatttcccanccttcttcatttcctgctccggcagctcttccttctctaaaactccgccccatttctttccaatgctccctgtcttcctccccctctgttgcggtgacagcctccaaagagtgcaaaagtgaaatctgtcaaagctagtcagatcattgacaccatgtgtaatcccacgttccaagtttatatgatcaccgaccgtctttatcgatcaaccgttccttaattcgcatctac

SEQ ID NO: 49738 - DNA, 455 bp, Gossypium hirsutum
  unsure (1)..(455): unsure at all n locations; Clone ID: LIB3197-008-P1-M1-H1
atggccttaactacccaaacttgtttccttcaaaatccattccttccttcgcctgctctttcccagccttctgcatttcctgctccggcggctcttccttctcgaaaactccgccccatttctgtccagtgctccctggcttccgccccctctgtggcggtgacggcgtccaaggagtgcaaggtgaaatcggtcaaggctaggcagatcattgacagcaggggtaatcccacggtcgaggttgatttgatcaccgacggtctttatcgatcagccgttcctagtggcgcatctaccgggatctatgaggcccttgagctcagagatggtgacaagagtgtctatggcggcaaaggtgtgctctttgccgtccaaaacatcaatgaaattttgggtcctaagnctattggcattgatgtcagaaatcaagcggatgtagatgctgtaatgctgga

SEQ ID NO: 49739 - DNA, 307 bp, Gossypium hirsutum
  Clone ID: LIB3197-008-P1-M1-H11
ccacaatgctggacagagccttctccgctcgccgcactcaacctcactccctcttcgacgtccccacctcctccgccgtttccgatgtctctcccgacgccgaatccgctgacttactcgctgacgagtccaaaaccaagaaaccacacctctacgtcttggcctccaattatatgtcgggcttgggactcgtcaaatcgccgtgcctctgcctctcactctgtcttcttttgatcgttttcatacttttctctttgatgcttaactctcgctccttcgtttgcctttcgtcctatgacccgatatc

SEQ ID NO: 49740 - DNA, 397 bp, Gossypium hirsutum
  unsure (1)..(397): unsure at all n locations; Clone ID: LIB3197-008-P1-M1-H2
gaaaaatggccaccattgatgttcctgagcaggtttcggttcttgcagatgcagaagctgttagaaaggcttgtaaaggatgggggacagatgagaaggcaataatttcagtgttgggtcacagaaatgcagttcaaaggaagcaaatcaggcttgcttatgaagacctttaccaggaagatctcatcaagcgtcttgaatcagagctttctggtgatttcgagaaagcagtgtatcgttggatattggatccagcagaccgagatgccgtgttagctaatgttgccataaagaaattaagccctgatcaccatgtgatcgttgaaatttcatgcaccaaatccnctgaagagctcttggctgtgaagagagcttatcangctcgatacaagcattc

SEQ ID NO: 49741 - DNA, 456 bp, Gossypium hirsutum
  Clone ID: LIB3197-008-P1-M1-H3
cggacgcgtgggcaacatccaatataaagtaaattcaaacaaaggtaaattaaacccaaaactttcataaaatcaaacccttcagctaacaagagacgaagaagatctaaagctactgccgggatgagaattactgtaatgactgcagatgaacagatccttagcttggatgttgatcctcatgaaactgttgaaaatttgaaagctttgctagaagttgagactatggtgccattgcagcagcagcaactgttgtttaatggaagggaaatgaacaactctgagaaattgagtgctttgggtgttaaggatgatgacctagttatgatggtctctggtgttgcttcaagtggcagtgcatctaggaatgacttgagcttgaatcctgatggatctgccgtgaatcctgcagctttccaacaacagattcgacaggattctaatctaatgggacaa

SEQ ID NO: 49742 - DNA, 222 bp, Gossypium hirsutum
  unsure (1)..(222): unsure at all n locations; Clone ID: LIB3197-008-P1-M1-H4
gaatgatccaacttatgttgtttgtaggtcttaagagactagaagaatacagggaattccgaccctattgcaataaatgagtgtttttaatttgtttattttatgttattctgactcaagtatgaatgtcgaatatgcgaatatattcaattttttaaaagttattttatttaanaaaaaanaaaaaaaaaaaaaaaaaaaaaaaaaaaataaaaattaaaa

SEQ ID NO: 49743 - DNA, 409 bp, Gossypium hirsutum
  Clone ID: LIB3197-008-P1-M1-H5
aagagactgagatgtgggttccaggccaatgaaccatgctacaagttttggtttccatacaagccctgattctgaatgctaaacccttctttaacgagcctggtttcgagatttcgtatgttggggccgaaggtgaaaagaggtccaggaagtacaatgaggatgcatttgctctatccttgaagacaatgatttacactctaagaaggccgccgctgcatttcgaggactttgtcgccggtcattttcgctcccatgcacgtgacattatcatggcttgtgaagcatataaagagggtgctgctatcggctccgttctggttaaagattgcgtaacagaccctaataaaaccgaaaacagtagctccgagagatttaaaagaacaatgacgaagatgatcgatgcaat

SEQ ID NO: 49744 - DNA, 438 bp, Gossypium hirsutum
  unsure (1)..(438): unsure at all n locations; Clone ID: LIB3197-008-P1-M1-H7
gcagaatcagagtgtaaaaaaggaaggaaaaaaaggctaaaagaatgtttttgcgaatgatatcgcggccgttgttggctaaggtgaaggagacaacggggatcgtcggattagacgttgtacctaacgcaagggaagtccttatcggtctctacaacaagactctgaaggagatccaggccgtacctgaagacgagggttaccgtaaggccgttgagagcttcacgcgccaccgtctgaaggtttgccaagaggaagaagattgggaaatgattgagaagcgccttggatgtggccaggtcgaggagctcatcgaggaagcgcgtgacgagctcactcttatcggaaaaatgatcgttgcagagtgggatccatgggngtgtcctgatgactatgaatgtgagggtttcgaaaatgatgctcctattcccaagcatg

SEQ ID NO: 49745 - DNA, 432 bp, Gossypium hirsutum
  Clone ID: LIB3197-008-P1-M1-H8
atttaataggctttagaagattcgtcggtgactcttcccggtcggtcaccgaatcgtgatcgctggagacgagtttgagtgtttctttatctttgtttgttagcgtaagaggaaagtgtgcgtgtttggattgataagaggaaaagagaaaatgaatgggaatagcaatggatttgggagtgccggtgcggtggcggcgactgagtttgtaaggacatcatcgacatgagactggagagaatcagtgtagttctgccgtcgtcaagcggatcaaagctcctgttcctctcgtttggtctctggtgaggcgatttgaccaacctcaaaagtataaaccctttgtcagccggtgtgttgcacaaggaaaccttgaaattgggagtcttagagaagttgatgtcaagtcagggctaccagctactacaagcactg

SEQ ID NO: 49746 - DNA, 450 bp, Gossypium hirsutum
  Clone ID: LIB3197-008-P1-M1-H9
caatctttcattctttgctgttgaagtagtaatatctatagcatacagagatggagaggcaaagaagcaagcaggtttgtttgttgatgtgggttttggttgctgcctttttctcccacaatagggtcattgcagtgacctccactggccttggtgagcagaaaaactactatccagctcctgaccctcatgctggaactcccccttcaggttcacatggcacaccaccatcttcaggaggtggatcacctccctctcatggaaccccgtcacatggaggtggttaccacccttcaccaacaccatcaacgccttcgggtggaaattgtggaactcccccacatgacccttcaactccatcaacaccatcacacactccttctcatggtactccaccatcatctggaggtgggtagtccccatcgtatggaggatgcagtcccccatcgt

SEQ ID NO: 49747 - DNA, 308 bp, Gossypium hirsutum
  Clone ID: LIB3197-010-P1-M1-A1
agcagctgtaccacaactacagagaagagaggaaaggggaaaaaaagcgtgcggtgggcttgcttcttcttctacttcgctctctctctttctccgaagttcctccttcgttcttttatttattcagtattgtaaaagatggccgacggtgaggatattcaacccctcgtctgtgataatggaactggaatggtgaaggccggttttgctggggatgatgctccaagggcaatttttcccagtattggtggtcggtcccggaacactggtgttaatggtgggatgggtcaaaaagattccctatgtag

SEQ ID NO: 49748 - DNA, 110 bp, Gossypium hirsutum
  Clone ID: LIB3197-010-P1-M1-A10
tttttataacattatcttttctgcttgtttgggtcctaacattttatattgaagagcaaaataaaaatgatgcccaacattctcctatctatcaactctcaaaacccatc

SEQ ID NO: 49749 - DNA, 422 bp, Gossypium hirsutum
  unsure (1)..(422): unsure at all n locations; Clone ID: LIB3197-010-P1-M1-A11
accctcctctgtgcgccgctctgcgttctgagagcattcgaacggtcttcgatgtcagccccttctccgatgatgacggagagaaccaggatcgcgccatcaggtaactcctttctctaattttactttcacttttattttacactagctataaacaaaagaataaaaggaaaatagaaaaaaaaacgaagagaaacttaaaaaaaaaactttgcgaaacttagttttctttgaatcttttttccttgtttctgtattcaatctgtgtaaaaaaggaagaaaaggcccctgttacagaaaatgaatcggctntttatagccaaagccaaaagaaaagaaaaatacataataaaaaaacaaaaatcccttctcctctctattcttttttttttctttttgctctttttttttgttttcttttt

SEQ ID NO: 49750 - DNA, 437 bp, Gossypium hirsutum
  Clone ID: LIB3197-010-P1-M1-A12
cttgtttaaaatataagaaaaaaaatcatacgcaatgagcactgctggtcaggttattcgttgcaaagctgcggtggcatgggaggcggggaagccactatcgatagaagaagtggaagtggcaccaccccaaaagcatgaagtccgtattaagattctcttcactgctttatgtcacactgatgtatactactgggagtgtaagggttacactcctctgtttcctcgtatacttggtcatgaagcctcagggatcgtggagagtgtgggtgagggtgtgaatgatttgaaacctggagatcatgtgctccctatcttcaccggagaatgcaaagaatgtcgccactgtctgtcagaagaaagcaataacatgtgcgaactgcttaggatcaactgcgaccgaggtgttatgcttgctgatgggaaaaccagatttt

SEQ ID NO: 49751 - DNA, 326 bp, Gossypium hirsutum
  Clone ID: LIB3197-010-P1-M1-A2
cagcactcgactgactgtctctgggactcccttctccagagtgattgcttgtaatcctgcatgagcctccgctgtgaatgaatcttcgatgttggagtggagaactgctaaatacgcaaggatttccccttccccattccaaactattaaccccgatgccgatctgaacgtctgactatcaaacgctgcatcaaaatgaactgttgcccatccccttttgaaaacttgttgataacagtcagaagtacggaagatataccatagtccacagcagaatagtcgcaactgctcctcgtttccttgaccaaagattccagtgagccatc

SEQ ID NO: 49752 - DNA, 333 bp, Gossypium hirsutum
  unsure (1)..(333): unsure at all n locations; Clone ID: LIB3197-010-P1-M1-A3
tccacgcgtncgattaacaacagattggctcgtggttatgaanagtggtaaataggctttgggttacaaaactgttcttaaatctctcagaaactccaaaggtaagttgattataattgccaacaactgccctcctcttatgaagtcagagattgaatattatgccatgttgtgcaaggttggagttcaccactataatggaaacaatgttgacttgggcactgcctgcggcaaatatttcagagtgtgcttgctcagcattatcgacccgggcgactctgatattattaagatcattgcccgagatcactgagcaacagcggacgacacatc

SEQ ID NO: 49753 - DNA, 399 bp, Gossypium hirsutum
  Clone ID: LIB3197-010-P1-M1-A4
gagattttgaggggaaatccaagtggagattatagatgaggtagatttactaacgattgctaacaaattaaaaaaagtttagatgtggattttcagtgtattaaatgttgaatgtatgaaccttttttcttctttttatcttttgttgatgtacagggtgggttgttttttaagtgtattgtgtgagttgtaatggttgttgctccctttagaggaaagaaactgatggaaatggaaaatgggggtcatcattgctagaaaatgaatgattgaatttgtgggtttttttggcaaaatctagtgaaaaaatttggtagaaaaaagatatttttgtagctaaaaatatagttaggggggggaattataaagtacttcggatgcttaaaaccctaaacttga

SEQ ID NO: 49754 - DNA, 447 bp, Gossypium hirsutum
  Clone ID: LIB3197-010-P1-M1-A5
ggaaaataatgttctgtactttgagtttgaatatatggaatgcaatctttaccagcttatgaaagacagagaaaagcatttttcagaagttgaaatcagaaattggtgcttccaagtctttcaaggtcttgcatacatgcaccagtgtggatattttcatcgtgacctaaagccagagaatttgttggtttctagagacataatcaaaattgctgattttggtcttgcacgtgaaatcagttcacatcctccatacacagaatatgtctcaacacgctggtaagtttgatacttctgagagtttattttgttttccttttttttctgttctttttctattactactatctaaactttgacttgtttaggtatcgtgcgcctgaaatacttcttcaatcatacctgtatacttcaaaagttgatatgtgggcgatgggtgctataatg

SEQ ID NO: 49755 - DNA, 427 bp, Gossypium hirsutum
  Clone ID: LIB3197-010-P1-M1-A6
cgagagtagtcatttttctttgcatcattgcatttttctctcgattgagcctctagggttttgaaagatacttaatatctttttttctttctctactacaatcgaatcgactctactagttttatcagatcttgaaatatccaagctgaactccttggctcgatcaaaacttgatcggattagtttcattcttgtctaatttcttttgagtaagaaagggaaaaaaatgccggcagtttacggagccagattgacgacgtttgaggattcagagaaagaaagtgaattcggttatgttcgtaaggtgtcaagaccaagtcgttgtgcagatggaatggctggtgctgccatgtatgaattagtccgtgttgggcatgacaatctgattggggaattattcggttggaaggagactctgctacaatcc

SEQ ID NO: 49756 - DNA, 292 bp, Gossypium hirsutum
  Clone ID: LIB3197-010-P1-M1-A7
agcaattccaatcttgtgatcagagtaacagttttcacagacaaggtgaatggggcgaatttgacgctgctcaaagtgctctactgttaaatgaatcagaattgcatggtcatcagttgaaggtacatttgattctgtaggtacaactaaattgcaagatgttggcaaagctggtttggtcacaattcaaggcaagaattcagccgagcttggaactgcacacatttgttagcgattcaatagccataaaaaacttcccgtgaagggctttatctcttttagtctaacctca

SEQ ID NO: 49757 - DNA, 293 bp, Gossypium hirsutum
  Clone ID: LIB3197-010-P1-M1-A8
gcaaaatggaagctgctgtagcatcgaaaccagtaattaaagttgctgccatgggtgggtctttaaggaaagcctctaacaacagaggcttaattcgaaccgctttggagcttaccaaggagtccattgctgggattcaaatggaatacatagacatttcaccacttccaatgctagatacagatctggaagttgatggcaagtttccccctgcggttgaggctttcaagcagaagattttggagtctgatagcatcctttttgctttccctggatacaacttttctcttact

SEQ ID NO: 49758 - DNA, 324 bp, Gossypium hirsutum
  Clone ID: LIB3197-010-P1-M1-A9
tctgaatcttattcttttgtcctctagagttggaatggaaaacccctcaggatgtggcagctgacaactatatgatgtctatgggtccttcaacctataacccttactggactggtatgcagccaggaatggatgggtttatgggtccttatgctggtgcgatgccttatatggggggctatggactaagtccattggacatgccatttggaggtgtaatgcctccagatccttttggcgctcaagggtacatgtttcctcctgtcctgcctcagaaagatcttgccgacttcggaatgggtatgaatgtcgccccaccaatca

SEQ ID NO: 49759 - DNA, 334 bp, Gossypium hirsutum
  Clone ID: LIB3197-010-P1-M1-B1
tagtgctccaacttatcaggtaattgaagaaggggttgttgtgtttgatatcatgggcctctccaatggatattgaccctaaacctgattctgaaaatgccgccctcgttctcgttaagcaaggagctgaagctagagttttcgagtccgtattcgctggaaaaaggtccatcgtcaaagaacgcttctccaagaaatacaggcaccccactcttgattctaaactcactctcaagcgtttaaacgcggaagctaagtgcatgaccaaagctcgacggcttggcgttttaactccggatctttacgccgtcgaccctgtgatccataccctgac

SEQ ID NO: 49760 - DNA, 394 bp, Gossypium hirsutum
  Clone ID: LIB3197-010-P1-M1-B11
gcgggattacccgctgagtttaagcatatcaataagcggaggaaaagaaacttgccaggattcccctagtaacggcgagcgaaccgggaaaagcccagcttgagaatcggtcgccatcggcgtccgaattgtagtctggagaagcgtcctcagcgacggaccgggcccaagtcccctggaaaggggcgccggaaagggtgagagccccgtcgtgcccggaccctgtcgcaccaataggcgctggctacgagtcgggttgtttgggaatgcagccctaatcgggcggtaaattccgtccaaggctaaatacgggcgagagaccgattgcgaacaaataccgcgagggaaagatgaaaaggactttgaaaagagagtcaaagaatgcttgaaattg

SEQ ID NO: 49761 - DNA, 449 bp, Gossypium hirsutum
  Clone ID: LIB3197-010-P1-M1-B12
aagctgacctccattcctctctgcaaatattctaccttcattaattctctaaccatgctctcttcaacctctttgaaccccatcaccaatcccaaaattcccttcttttcttctttttcaatccaaagcccatctcttttatcctttcatcttcctttctcaccttcaaaaaccctcttaaaacccatctcagctactctgatcccctccactcctccgcctcaacagcaacaactttatcaaccttttaggccacctccatctccactccctcctaaattccggtcacttgacgctcaaggtcgcttagatgtcttagccaaccggaatggcctttggtttgaatatgcgccacttatcccttctctttaccaggaaggtttctcacctccttcaatagaagaaataactgggatcactggggttgagcaaaatagactgatagttgc

SEQ ID NO: 49762 - DNA, 249 bp, Gossypium hirsutum
  Clone ID: LIB3197-010-P1-M1-B2
ggagcttcaatcatggtggtttcgctagcagggtttgcaagcgcgtgttataggaacaccttcttgatggggctttacctcttcgtcatggtcttcatcatcggcggccttatcgggttcataatctttgcttatgcggggactgattaagggttcgggccggccgtggtgaacaaaaggtacttggaggattacttggaggacttctcaaggtggctcaaagaccgggtggtggatgagagcttttgg

SEQ ID NO: 49763 - DNA, 105 bp, Gossypium hirsutum
  Clone ID: LIB3197-010-P1-M1-B3
tgttacggagagaaaaacagattcgtcgtcggttttactcttccatccgtagacgcaaaccaaaaggtgtaaaaagaaaacaaggaagaaatccctacaaatttc

SEQ ID NO: 49764 - DNA, 430 bp, Gossypium hirsutum
  Clone ID: LIB3197-010-P1-M1-B4
ctgacgcgtgggttggtagagcacctcgtttacgacgtgcgccaatgtttttcagggaagtctatcatgcaatcaaaagaattgatctttttgagaaatcgatgtcttactccattactttgaaggaacacaacaagagaacaatttcctgtcaaatgggtcggtccgattcgggtgccgtttaggcaagatccgaatcgaacccatcattgatttgagatattgattgggtgaataccccggctattcaatgctaggcataatgagtataatgacctcaaaaatgctcttttcgtcctatgaatcttaagggggttgaagttcatgtgtggtttttttattaggagggggagactccctttaacttaggttggtctaagccagaagcagacctacgttaagatatcctctcccttttttaaacacttgg

SEQ ID NO: 49765 - DNA, 136 bp, Gossypium hirsutum
  Clone ID: LIB3197-010-P1-M1-B6
gtctgattgaaatggatggaacaattttcctacataaattcagacggatgtgcagggacctccattcccttgcttgtttactgaacccttccagctatatggctccttaccgggaattttatttgtcctgaaattt

SEQ ID NO: 49766 - DNA, 263 bp, Gossypium hirsutum
  Clone ID: LIB3197-010-P1-M1-B7
ttcctaattcaattaaacatcatttttcttgtggcatcttctcaatgtgaggggcgcttggttgggaactgttacaatgtaccgacctgtggctacagctgcagccacggggggagtcccaactgacaatggggactatgttttgactttggatcaattcccacggtggaatgatgcacaaattattgtctccttgtgagtttagaatgaaaatccttcatgttcaaaatcctttttataagacctctttaaccttttcttgg

SEQ ID NO: 49767 - DNA, 366 bp, Gossypium hirsutum
  Clone ID: LIB3197-010-P1-M1-B9
ttcaggatatggctgagagaaagagaaggaagcttaagttgttagccgaaacgggaaatttggatgaaaaaattgcaaccgaggaggaggagagttttaagctacaaacgtggtctgatcttcctgtggatcttttgtatattattctttgcctcctaacactattgttcattgtgtccagcgttttcttcataaagtattgtggcttaagttttttagtttacttttttttttggacttttttttctttatattttttttttttaaatttttttttcttaatttttttttctcactattatttttttttctaatttttttttcattaaaattatttttcttacattttttatttttgtcaacctt

SEQ ID NO: 49768 - DNA, 316 bp, Gossypium hirsutum
  Clone ID: LIB3197-010-P1-M1-C1
ctaatctattttctccatcaacctgaagtagaagatgggaacattgggtaaagcggtctacaccgctggattctggatcagagaaaccggccaaactctcgatcgccttggctgccgcctccagggcaactactacttccaagaacaactgtcgaggcatcggacgctgatgaacgtattcgacaaagctcctgttgttgatagggatgccttcgtggcacctagcgcttctgtcataggtgatgttcaggtcggacgagggtcttctatatggtatggatgtgttttgagaggtgatgttaataacatcagcatc

SEQ ID NO: 49769 - DNA, 319 bp, Gossypium hirsutum
  Clone ID: LIB3197-010-P1-M1-C10
gcaggagctgagaaattcgtggaagctgataatgcggaagccataataacaagaatcgagcacaaatccaggaagatcgagagcttacttaaacagaataagcccgttgaagctcttaaaactgcgctcgagggatcttctcatatgatacgtgacgagcgatgcaagtcagcgaattggatagttgtgcatagagcgctaatggctataaaagatgtcgaaagaatgttctcttctttggatcctgagtactatgatattcttatgaagtacttgtatagaggattgtcgaccggagatcgccccacatgtgatcagt

SEQ ID NO: 49770 - DNA, 158 bp, Gossypium hirsutum
  Clone ID: LIB3197-010-P1-M1-C11
cccacgcgtccgaaaagacagggcagagtaagctaagctttgatcatcaatggcggagaagagtttcaagtacgtgatccttggcgggggtgtagctgctggatatgcagcgagagagtttgccaagcaaggagtgcaacctggtgaactagcaatta

SEQ ID NO: 49771 - DNA, 356 bp, Gossypium hirsutum
  Clone ID: LIB3197-010-P1-M1-C12
gcggctaccacctatggtctccaacaactcgatgtacaccaatcccgcctttcccacgaagcaaggatatttccaagttcaagtcagctgaatcacacgattacggtttctatgaacactcctcttctccaaccccatcttgcttcccccggacagaacataatcggtcatactataaacccgcaaccttttaccggagttccaatcatggctgcacctgtatctgttgttcctccatcaagtcctatcatcggtaccaccgatcttaggaatgctgccaaatcttttaaggcaccagctcagttgactatcttctatgctggatctggatgtgtgtacgatgatgtattctccga

SEQ ID NO: 49772 - DNA, 353 bp, Gossypium hirsutum
  Clone ID: LIB3197-010-P1-M1-C2
atactctcaaaacactttgctttctttgggattcgtgattttccgaaagctgggttggccggaactcttaccaaaatacctcaggtacaagtgatcaaagagaatgggaagaggaaaaatagagataaagaggatcgaaaacacaacaaatcgtcaggttaccttttgcaaacgcaggaatggcctgctgaagaaagcttacgaactgtcagtcctctgtgatgctgaagttgctctcattgtcttctccagtcgaggccgtctgtatgagtactccaacaacaacataagatcaacaatagacatgtacaaagaaggcttgctcagatacttctaacacaaacactgttact

SEQ ID NO: 49773 - DNA, 384 bp, Gossypium hirsutum
  Clone ID: LIB3197-010-P1-M1-C3
attctgccatgcggacatacaattcacacaaattgtttgaaggaaatgagggaccatttccaatatgcctgccctctgtgctccaaatcggtttgtgacatgtcaaaggtctgggaaaaatttgatgaggagatcgcagctgcgccaatgccggaagagtaccataacaaaattgtttcgatcctttgcaacgattgtgggacaaaatctctagttcggtttcatgtcctggctcagaaatgtccgaattgcaagtcatacaatactaggcaaacacgaggctgaagtggcttaaagtgggatgtagaaaccgacttggatggcatattttccaaatcgatgcatcaagcattgagttctgggtaagcttctgcaacgcgtaat

SEQ ID NO: 49774 - DNA, 299 bp, Gossypium hirsutum
  Clone ID: LIB3197-010-P1-M1-C5
gcacttgccaaggcattggctggtcagaaagatgaggccttcttcacttccaatgcgcaccgctcatgcttcaaggaagtccttcccaagagtgaccaatgaggctgttcaaaaagctgctgctgctttgaagggctctgaccaccgccgtgcaacaaacgttagtgctaggctggatgcccagcaaaaaaagcttaatctgccagtccttcccaccacaaccattggatccttccctcaaaccttggaactcaagaaagttcgtcgtgaattcaaagctaacactatctctgtggacc

SEQ ID NO: 49775 - DNA, 422 bp, Gossypium hirsutum
  Clone ID: LIB3197-010-P1-M1-C7
tcggacgcgtgggtaagctttgagatttatcgatggcggataagagtttcaagtgcgtcatcctcggtggtggtgtcgctgccgggtatgcggcgagggagtttgccaaacagggagttcagcctggtgagctagccattatttccaaggaagcggttgctccatatgaacgttctgctctgagtaaggcgtatctcttccctgagggagctgcaagacttcctggtttccatgtctgtgttggaaggggtggatagagattgcttcctgagtggggcaatgaaaaaggaattcaggtgatccttatcactgaaattatggaaagcaaaatctttctgcctatacctcttgtatgcgcatcttgataaaacgttcatatatcaaaattttgatcattgcaacctggtttccacactttttat

SEQ ID NO: 49776 - DNA, 317 bp, Gossypium hirsutum
  Clone ID: LIB3197-010-P1-M1-C8
agtccccaaatggattctccgtgtccgttcaaatggcgaccccgcccctttcatcccctacttatcttaccaccaatataggcgtcggctacgccatcgtcgtcgccctcggctttctcctactcctctccactctcctcctcgcttcctacatttgctctacagttttctcaccccttccacctcgggccatttacccaaaccccattttaacacccaccggcgccaacttcgacagtattcgccttcccatgattgtttttatcggcgaagaagaccatgaaaaccacgaggaaaaccgtcgcgtcttttggctt

SEQ ID NO: 49777 - DNA, 314 bp, Gossypium hirsutum
  Clone ID: LIB3197-010-P1-M1-C9
ctcactcctgttctagatgaaggttctctcgccaattcttgcttgcctagcgcgtgctgtggtggtaagccatgctgttctctcacctgagcaatattggagctataagctgccaaatattccaatgccaaaggctgtcaaagaaattctacatccagaactgatggaggagaaaagtacctctgtaaatgtaggaggtggtggtgtaaacgtcaatacaggaaaagggaagcctgggggtgacacccatgtgaacgttggaggcaaaggagttggagtgaacacgggaaagccagggggtggcactcatgtga

SEQ ID NO: 49778 - DNA, 310 bp, Gossypium hirsutum
  Clone ID: LIB3197-010-P1-M1-D1
cttctttatctttcccacggaaacgaagagcggtcagaaaaccttgtgaagaagggatgagggaaatcttgcatatccaaggaggtcaatgtgggaaccagatcggggctaagttctgggaagtcatatgcgatgagcatggaatcgacaacactggaaagtataacggtgactccgatctccagctggagcgtatcaatgtctactacaatgaagccagtggcggtaggtatgtccctcgcgctgttctcatggatcttgaacctggcactatggactccgtcagatccggtattttcggtcagatctt

SEQ ID NO: 49779 - DNA, 322 bp, Gossypium hirsutum
  Clone ID: LIB3197-010-P1-M1-D11
tgtgactcgtggggaaagatgatcaaaatggggtttattgttttggccttgatgggggtttccgccgcgacggtggttacggcggctgacgagagtgggttagcgaatgagtgcagcaaagatttcctgagcgtgatgacttgcttaagctttgctcaaggaaaagcatcgtctccgtcgaaggagtgctgtaattcattggcggtgatttaagtaaatatacccaaatgtttgtgttatattttgcaacaaacacaaacctttggtgctcaaaatctcaaaagcttatgtgttcaagatgataatctgttttcattaccat

SEQ ID NO: 49780 - DNA, 312 bp, Gossypium hirsutum
  Clone ID: LIB3197-010-P1-M1-D12
ttccgaggcagccccttgcctggaaagatgttaccatttgtttatgctggcaatgctagcaatgctaccaacgggaatttgtgtatgatggatactttgataccggaaaaagttgccggcaagattgttctttgtgatcgtgggatgaacgccagggttcaaaaaggagctgtcgttaaagcagccggtggtataggcatggttttgtctaacactgccgcatatggtgaagagctggtagcggatgcccatttgctcccggcaaccgccgtgggtcaaaaatctggtgatgctataagagactactttgtt

SEQ ID NO: 49781 - DNA, 188 bp, Gossypium hirsutum
  Clone ID: LIB3197-010-P1-M1-D2
atatatcgcctcggagatcggacccttgagtcgccggataatcatcgacgactgggcgagactccgccggagccaccagaaaagtacttcttaccgtttctacggcgagagagtggatttgaatatattggccgtgttttggttttcgatggcttcggaggatgtgaagactagtgaatcagctgttt

SEQ ID NO: 49782 - DNA, 455 bp, Gossypium hirsutum
  Clone ID: LIB3197-010-P1-M1-D3
gtgtatatggagaattgcggccattaatgaggcaggtgggtggaaggatcggaccaccgtggatgacatggacctggcagtcctagccagtttaccaggatagacattactatacctgctaatcccaatagtgccttggactaaatgtagcattgttaagacatgtctactccagatgctttcttcttctttggtttgttgctaatgatttgtatgtacaatctttttgtgttggcccttagttttattgttgactgatttttcttttgattaaattttaatttgatattatttgttttcctattaaattttttttgatcaatatgttttatatatttaatataatttgtttttttttatattttttttttttgttaaaatttttttttatttattatatttttgtttagcgaattattttctttctaagattatttttttatattataattttt

SEQ ID NO: 49783 - DNA, 210 bp, Gossypium hirsutum
  Clone ID: LIB3197-010-P1-M1-D4
cgctctttctctcaattttctctatcttttgatggtttctctttcatttctctgggaattattattatttccttcagatctctcaatctcttattctattctttccttaaatacccttttaatcggattaccatttacctaatctgttcttctgggctgtggtcctaaaaatattattgaccaacctggtccaggtattgtaacaccccc

SEQ ID NO: 49784 - DNA, 193 bp, Gossypium hirsutum
  Clone ID: LIB3197-010-P1-M1-D5
attttatttacttagagctacagagtgagagaggtggtcaaatccgtgaccaggatgaataagtctggttccatactcaaaacctaacatacataatcaaaatccctgcctgctactgcttaatgtaatagaaagtaaagagattgtattttggggggggttttttttctcatttgtttagaaaaaaattatt

SEQ ID NO: 49785 - DNA, 388 bp, Gossypium hirsutum
  Clone ID: LIB3197-010-P1-M1-D8
ccattttccccgagtaaaacgccaaagaaaacaaaaaatatgagagaaatcttgcacatccaaggtggtcaatgtgggaaccagatcggggctaagttctgggaagtcatatgcgacgagcatggagttgacaacactggaaaatataacggtgactccgaccttcagttggatcgcatcaatgtctactacaatgaagccagtggtggaaggtatgtcccacgcgctgttctcatggatctggagccgggcactatggattccgtcagatctggtccttttggacaaatctttcgccctataacttcgtcttcggacagtctggtgctggcacaactggccatggtcattcacgaggagctgactattgatctgtctgatgttgcag

SEQ ID NO: 49786 - DNA, 257 bp, Gossypium hirsutum
  Clone ID: LIB3197-010-P1-M1-D9
tgttaagctttctttcttcctttctttccctggaacatattcccccactctcggggatggaccctcgaggcggtgatgccatccccgacggcgaaaccaacgattttagatccttcgaccatcccgatgatgacaagtcttacccttacaccggggatggagctagtccttgctaaaattttgtatgatgtttatcgagtgagacaagatctgtactatttcttgagcattttggttaatatggtgatattacggat

SEQ ID NO: 49787 - DNA, 247 bp, Gossypium hirsutum
  Clone ID: LIB3197-010-P1-M1-E10
ttcttcttctgtttaacaacgctcctacttgggccatctccactcaatttttggcaacaaaatccactcatggtaccgccaattctttcccttccttttctcactttcacgttagcttcccttcatcagggcaaaaagtaagttttagaagaagggccagagtccgtacttatgggatcaagtgttcggcaaaagtagattattgttctgcacctgtgaatgaaaaaagcgtttcattcattctttt

SEQ ID NO: 49788 - DNA, 346 bp, Gossypium hirsutum
  Clone ID: LIB3197-010-P1-M1-E11
ctttctaggaattgctacgaggattcgatgaagagactgcagctgttgtaatggcaagagtaacttccctgaaaatggagactgaggtaaattaaagtcttcttttcagttatctcccatttgtatttctttttgaatgtatgcaccatctgatttggatgataccttctgctagttcattatgctatcatttatggaataatttccattctcattctgtttccttattatagaatatggatcagagctctctcttagtgctttgccctagtttttagcgcttctctctgcttgctttcctcttagccctgacaattttggtcctgctctcttttatctattatct

SEQ ID NO: 49789 - DNA, 228 bp, Gossypium hirsutum
  Clone ID: LIB3197-010-P1-M1-E12
ttttctagggtttttttgatcgatctgagagaggaaggaatatgggtgcgggaggcgattcaagtgagtcacgactcggtggaaatggaggaggtgaagaaggagtgacggttaatatacgctgctcgaacggtacgaaatttacggtgaggaccaatctcgaatccaccgttggatctttcaaagctcttttggctcaaaattgcgatatcccagctgatcagcaac

SEQ ID NO: 49790 - DNA, 236 bp, Gossypium hirsutum
  Clone ID: LIB3197-010-P1-M1-E2
attctaagaaccccgaataaattgagggaaagagagatttaaaaaggatataagagtggtgccttaaactttttatagatctgtgttttatctaacattttgcataaacaagaattcctgttttttcctgtttttcttttcgtatcctattagaagttaacgaagtcatctaaatgggatactgcaagcttatttcttgttgcttcattgcttgcattttgttcctcggcgtttat

SEQ ID NO: 49791 - DNA, 281 bp, Gossypium hirsutum
  Clone ID: LIB3197-010-P1-M1-E3
agcagttactgtgtgtcctttgtttgcatttgcagctttcttcttctataaatgcgggctgaaactccagcttctctcattccattctcattcgttttgttaaacccctccctttgttggaaaaatggcagagcgtgtgatcacccgagtacacatcctccgggagcgtctggatgacacccttattgcccatagaaacgaggttttggccttgctcacaaggatcgagggtaagggaaaagggattctgcaacaccatcaaattatcctagagtttgaag

SEQ ID NO: 49792 - DNA, 318 bp, Gossypium hirsutum
  Clone ID: LIB3197-010-P1-M1-E4
ggatttgcatcttttgtttcccattcccatccgcatcccttttataactcacctgccatttctccttttcctcaacattccaatcttcttttctgggtgtattttgctttgttgaattcatcatatcttcttcactaatcatggctatggctgcttccgagactaaattccatgttcttgctgttgatgataccctgattgatagaaagctcattgaaaagcttctcaagacttcttcttatcaagttactgcagtggattctggaaccaacgcattggagtttcttggattgaacaacaatgatcatcaaaatgttg

SEQ ID NO: 49793 - DNA, 302 bp, Gossypium hirsutum
  Clone ID: LIB3197-010-P1-M1-E5
gaagggttgtcttttaaccacttcttcttttgtttccattgctttgaatatactgatagagatgcaagtttctcacatgctaagctccttcatcaccattcttgtactccactgtcttcttctttcaacatttgtttcctgctcatcccatggggagattactgcatccaccaatcacaaaaacattaaaggaaatgcacataagcttagttctcaaatgatatcttatatggctgttcatggccttctgctatggagttccatgggattcttaatgcctgtaggcatacttactgttagaa

SEQ ID NO: 49794 - DNA, 330 bp, Gossypium hirsutum
  unsure (1)..(330): unsure at all n locations; Clone ID: LIB3197-010-P1-M1-E6
gcgggatgcatttaatatgcggagtgaaggtttccaatcatttccaccaaactatgttgcatccgatgattataatatcggtgggaatacttttatggaaacgagaagaagtgtaccggatgaacaaccgaatgaagaagcggcggagttctacacgttacttggtgaaatgaatgaagaactttatgagggatcaaaattntaaaaaatgtcattctgtattcgccttttccacataaaatgtttgggagggtggaccggaaactctttgacaatgctgttagagcttttgagagaaatgttcccgtttgcaaaaatccctcatcatgt

SEQ ID NO: 49795 - DNA, 279 bp, Gossypium hirsutum
  Clone ID: LIB3197-010-P1-M1-E7
gcatctttgagaactatatcctctttctaaagataaaacaaaatattaattaggatatatggcaggtgattcaaggaagaaggaagagatgtcaaaggtgaaaatcatcagcacaagtcatgtgaagcctggaaagatgataggaagaaaagaatgtcaattgggtacttttgatctcccatatttggcattccattataaccagaagctgttgttttacaagtgtggggagtttcgaggagaatgtggaaaaactcaaggatgggctgagagtggttt

SEQ ID NO: 49796 - DNA, 313 bp, Gossypium hirsutum
  Clone ID: LIB3197-010-P1-M1-E8
attttaatggcggggagatgggccacggcggctttccggtgggtattttcagacttaatatcagttcggcggtggccgatgcgatggggtcacgtggagtggcctcaacttagtggtttcagcttttcgatcgtggacgacgtcgtttggagtctgatcacggcgtttgagtctgtcgctttggtttctatgctctgcttcttttttcttgtttgcggctgtactttctgagaaggagaaaaaagaaaatactaggattgtggattgccggaatgtttgtcgaatttgacgtcagctgtgaggttcttatgtc

SEQ ID NO: 49797 - DNA, 364 bp, Gossypium hirsutum
  unsure (1)..(364): unsure at all n locations; Clone ID: LIB3197-010-P1-M1-E9
attcatatctttcgtcaaatcaaataaactgtgcatatctcancgtattctgggtcttctccctttttcattccaactttttatccgcgaatatttggtttccgcgcttattttaacctatttctgttatattttttgccgtcataacttttaacattctttttttttctttttttttgtgcgcttttttttttttttcctttatttttgtcaatttttttcttaatttttttattttttatttttttttggtaaaattttttatttttttttatattttttggttttttttatttatttttcttttttttatttttttttatttttttattttattttttttttcctttttttttattttttt

SEQ ID NO: 49798 - DNA, 309 bp, Gossypium hirsutum
  Clone ID: LIB3197-010-P1-M1-F1
cccacgcgtccggcgagagaccgatagcgaacaagtaccgcgagggaaagatgagaaggactttgaaaagagagtcaaagagtgcttgaaattgtcgggagggaagcggatgggggccggcgatgcgccccggtcggatgtggaacggcgagagccggtccgccgatcggctcggggcgtggaccgacgcgggtcgtggcggcggcccaagcccgggcctttgatacgcccgtggagacgtcgtcgcctcgatcgtgggattcagcacgcgccgcctcggcgtgcttcggcacctgcgtgctccgggcg

SEQ ID NO: 49799 - DNA, 342 bp, Gossypium hirsutum
  Clone ID: LIB3197-010-P1-M1-F10
aattattaagaaattctgacggattatctcttcaaattttctcagggcttgtgctgaacggaatggcatcgctatcaagtcagccgcagttccgctacactcaaccaccgtcgaaggtgctgcatttaagaaacttgccatgggagtgtacggaggaagagctgattgagctggggaagccatttggtaaggtcgttaataccaaatgcaatgttggcgccaatcgaaatcaagctttcatcgaatttgctgatttgaatcaagctattgctatgatatcatattatgcttcatcttcggagcctgctcaagttatgggcaaaacggtctacctacaatatt

SEQ ID NO: 49800 - DNA, 285 bp, Gossypium hirsutum
  Clone ID: LIB3197-010-P1-M1-F11
gtgactgggaaggtaaagtggttcactgaccaaaggggatttggtttcataacgccggatgacggcggcgaggagttgttcgttcaccaatcgtcaattcgttccgacggttttcgtatcctcgccgacggcgaagaagtcgagttcgttatcgattcttctgaaggaggtcgtaccaaggctgttgatgtcactggccctaatgggaaccctgttcttggcaccacgagatctggacgcattggtggcgggagtggattcggcggtagaggaagaagaggaggt

SEQ ID NO: 49801 - DNA, 306 bp, Gossypium hirsutum
  Clone ID: LIB3197-010-P1-M1-F12
attttgggttttagttgatgctttgaatgaggtcaaacaagaagagattaatgggatcatgaatgactttgctgaacctgggtcacttgctccaactggattgtaccttgggggcacaaaatatatggtgatccaaggcgaacccggatatttaattctagggaagaaaggatccggatgtattactattaaaaagtccaatatgggcttgctcatcggaatctatgatgaggccaaaactttccggccaatgcaattattgttgaggaaaagcttgggtgattaattttattgaacaaaggtttt

SEQ ID NO: 49802 - DNA, 357 bp, Gossypium hirsutum
  Clone ID: LIB3197-010-P1-M1-F2
tttccctgttttacaagaattaacactgaagacgaatgatatgataaaggggatatgtgatggacaactctcattgcagtgtttcccaaacctcaaacttcttaacctccaattctttcctgagacatctactactcttccatattccttcattcagtcactaccaaagcttgagaagcttgttataaacaatgcctccatttctgaaatagtccggtttgaaggactcatcaacgaggaaaggcacacatgggcatgctatcagttagaggccttaaagttgtctcaacttccagagctaacattaaagactttagagccatttttgttgtctgtcaaaaatctattaagtatgga

SEQ ID NO: 49803 - DNA, 223 bp, Gossypium hirsutum
  Clone ID: LIB3197-010-P1-M1-F3
ttaacacatcaatgtgctttcaagcattgtggaatacctagcatcaagggatggtgcgatcatgcgaagtcggaatggtcatgctcctcttttccttcggtatactctcaatagaaaaggttatacaggatctcataaagatgttcagaaatgcctcagaattgctcactacttgaaagaccgactgcacgatgccgggatcagtgctatgcttaaggaactt

SEQ ID NO: 49804 - DNA, 235 bp, Gossypium hirsutum
  Clone ID: LIB3197-010-P1-M1-F4
gttaattgcaatactttttgctgaaattaaagggggtggaattctttatgggacggggctttgtttcctatatatttactgctttccaacaagctggttttgtatgatttggaaaatcataccattggattgactgagtacatttgtgactatagtgttacttttcatttcaccaatggtgtatataagttcgactacatggtttaaatcttactgtattatcatttggttcttt

SEQ ID NO: 49805 - DNA, 316 bp, Gossypium hirsutum
  Clone ID: LIB3197-010-P1-M1-F5
ctaatgtatgtttgctacgaagattggaataataatttgattcttgctgagatacaattattgaaaagatttatatgagatataaagaatatctagattttcttataaagaattttgtgaaagaccaatttcatacccgtggtattcaggctcgatgcttagcgaatgtagtgccagtgaattaattcagactttaagtctagcaggctacgtgccggtgatctgaatcagattataaacctatcaagctacgtgccggtgatctgaatcaggcaataagcctaacaggctaaatgccggggaatatgttaaaata

SEQ ID NO: 49806 - DNA, 194 bp, Gossypium hirsutum
  Clone ID: LIB3197-010-P1-M1-F7
tttaaaaagtgattccaaaatactctactaagcatttactctgcaaagacatgggaccaaaatacccactcaaaagattaaattttatcactatacacactcttcctacccatcactcatcaaaagatatagcaaaaccaatacttattacaaccattttataaacaacttactactttcatactattattgaa

SEQ ID NO: 49807 - DNA, 253 bp, Gossypium hirsutum
  Clone ID: LIB3197-010-P1-M1-G1
ataaaaaactcctactgtctcactttgctctggtcttgttcctgtgctctttgagcaaactatcgccgacatcctcttcaaaagaatggcatatgaacggattctgttgcggatgggtaatgctctccttgacatttcactagtcgtggacgaagagttcttgtaaaaatatgatctcaagatgaacaatgcaattttagctgtagagaaacaccttcccatgtatcaagatatggcattccaagcccaatgt

SEQ ID NO: 49808 - DNA, 365 bp, Gossypium hirsutum
  Clone ID: LIB3197-010-P1-M1-G10
gtcgaatttcactcttctttagaagcaagcaaaattttcagaaacgtgtaaggggtggtatttcaggctttggggtttccggagtttctatcaatccagcgctatcggtattatcttttaagttctcagagaggtgatttaaagccacctttgaagaaagaaggagtagaaggaatgacgattaaaccggcggttaggatctccgagaggaaattagtggtaaaggagcggacaatcctgaccggagttcccgaaaatgtgatcgcaacttccggtacagcagcccggtcggtggaggagggttttcctttggtgcgggttttgatgaaaaaaacagcaaggcatttggtgcccattcgggactt

SEQ ID NO: 49809 - DNA, 367 bp, Gossypium hirsutum
  Clone ID: LIB3197-010-P1-M1-G11
gaaagatacgagaaactgctatagataattttgagcccatgaaatccaaaggtggggagactagtgagcacattctatcaatgctcaaggcggagaaggaagaactagaatcatcattcaataatgagaaattgctgtctctccagctaaagcaagaactagcagatgctgaagctcgaaacacagacctatacaaggagctccaatctgtacgtggtcaacttgcgttcgagcagtcaagatgtttcaaattatagggtgatgtatcagaactacgacagaaactacagacaatggaaacactacaaagggaacttgaactcttgctgcgacaaaaagccacatctcgaacaagttggcattaaat

SEQ ID NO: 49810 - DNA, 358 bp, Gossypium hirsutum
  Clone ID: LIB3197-010-P1-M1-G12
ggaatccaaaaccagtccaccaccttcattttccttcattttctcactgtttctcactgctgcatgcctctttacaccattgggagctcaacagcagtcacccatcaagaccatagtggcgttggtgatggaaaacagatcctttgatcacatgctcgggtggatgaagcacacacgtcaacccttcaatcaatggagtaactggagatgaatgcaacccggcttcaacaaataacccgaacccggaatccatttgcttcaccgacgatgctgagtttgtggatccggatccaggtcactctatcgaagctgttgaacaacacgttgtttggttcttacaccattccttccatgtctg

SEQ ID NO: 49811 - DNA, 350 bp, Gossypium hirsutum
  Clone ID: LIB3197-010-P1-M1-G2
gatttatttgctgcaaatactacgatgaatcaagacaatgaacaagacaataacggctgatgcgttagatgattttctgctaaagcgcaaacgtggtcgcccaagaaagcacccaaaacatgatttaaatcagggggagaatgctcagatgccttggaatcagaacctgaaccatgctgagaatgcccatgtcccacctggatttggagcagtgaatggaaaccgaccccaccaagtgaatcctgatgcaaatgacgtaatggttggtcaggctgttagtggtgttattgaggcagcattcgatgccggatatttgcttactgttaaggttggcaactctgacaccactt

SEQ ID NO: 49812 - DNA, 264 bp, Gossypium hirsutum
  unsure (1)..(264): unsure at all n locations; Clone ID: LIB3197-010-P1-M1-G3
gttctaatgaacattagccatcagctgcatgggggaanaatgcatgttgattagtggcaagatccttcangtctaccggattgctcatgatcaagatttgaagaaatcgcatcctaagcttgccatgaagtggcatcccaacaagaatcctcattccaataaagaagctgaagccaattttaatcaaatcttccaaccttactatgtttccagcgatcctcaaaagcgtgccgttttcgatcatttacgggatataaggattaa

SEQ ID NO: 49813 - DNA, 245 bp, Gossypium hirsutum
  Clone ID: LIB3197-010-P1-M1-G6
aacttattatccacctgggaggtgcaaccaagagtcaacaatatgccgtggtctgggcgtttatcggaatcaatactttattagataacagatcatacagtatctcatttggggagaatttccatgacctgagtaataatgacgatattcaatccattcaacacatcgacctttgatatcaataatatttccattggagaaccgtgtaaatgaacattggcagataccataaagagatatatatc

SEQ ID NO: 49814 - DNA, 335 bp, Gossypium hirsutum
  Clone ID: LIB3197-010-P1-M1-G7
ctaacttgatgcagagcttaaagtataatagttagatggttccgaagatgcatgtcatacagtaattttaaggataaacatgcagaaaggaataattatggatgatacttatttacttgcagtttgcaagaagcacagaagagaatgaagataaagaagcctcctcacatcctggttatccatttgaagcggttcaagtacattgagcagcttggacgatacaagaagctctcctatcgtgttgtatttccacttgagctgaagctgaacaataccgtggaagatgcagatttggagtattccttattggctgtagttgttcatgtgggaagtgg

SEQ ID NO: 49815 - DNA, 219 bp, Gossypium hirsutum
  Clone ID: LIB3197-010-P1-M1-G8
ggcgtttgaagttggtatgggaaggactggggcttggagaaagaattgcagtgggaaactggagcagggtcgggctggaccggctgaaataagaaaatctctatgggatggaaaacaaaaggacctagtagaagaagtcaaagaactagaaaaattggaaagtgttttcattccacctaaattttgcattagtttaatttcgattaaccacatactctg

SEQ ID NO: 49816 - DNA, 388 bp, Gossypium hirsutum
  unsure (1)..(388): unsure at all n locations; Clone ID: LIB3197-010-P1-M1-G9
cttattccacaaccaaataaatacaactcttgtgttctgtttcacctaaagcacaagaagctttgctttttcctttcttctttcattaagagtttttaattttttttccctactttgtggggtttcagtattctttcttttcaacaggttctgatgcattcaagctttcaaggactatacttggtctgcgtttttctagcgttttctattgttgggttttgcgttttggggttaaaggcttttgagaaacgtttttttctttcaagttcaatcatgcctgctcttgttaattacagtggtgatgatgatttctataatggagggtccttttatacaaattctactgactngggtagattgtgttcaatcagtttccaagttgatgtgt

SEQ ID NO: 49817 - DNA, 216 bp, Gossypium hirsutum
  Clone ID: LIB3197-010-P1-M1-H1
cggacgcgtgggaaaaagtttaattgagttctccgatcatggccctctctgctcgtatcctctcaaaatctcgccagctttgtggtagtcaatctattctacaaaaggagaataccattcctgttcgtttttatgccaaagaggctgctgctcccattgctaataagggagatgagatattgaaaaatatctttttggaggttaaggcaaaatatg

SEQ ID NO: 49818 - DNA, 360 bp, Gossypium hirsutum
  Clone ID: LIB3197-010-P1-M1-H10
gtcaaggaaaaaaacacaacgggaacataaatgagagccgccatttacagactggaccactgagcccatatctgaagtcaagctaccctcggcattaccgcctgatcataggtatttcctccactctcccttctctttcacttttctatatctccgttttcttttccccttcttttccggtgatttaatatcgttgaaatcattggtaaaatgttttttttttttcaagttttgggtagttttactagggttaacgttatatgaagatttggggtgtttgagcaatttgggtaatgataatataacatgaattctgggtttgaactccggatagtatatagcttggtggaattttcatga

SEQ ID NO: 49819 - DNA, 376 bp, Gossypium hirsutum
  Clone ID: LIB3197-010-P1-M1-H3
agacgcgtggggttatcaagtctagaatccgtggcattcacgcccttatgatgggacaattgctcatcttcgaacctaattgagtcgccttggaaagcctattgcagctgatgcgggtgggaagttgtacacaattatggagatttgccgtctttttgatcaaaatttcagagaacatttagatggggtgcgtactggtggtgataaagattacaatgttttcgacaaccaacttcctgctgctttgaaaaggttgcaatttgacaggcaactatcaatggagaatattaggaagctcattaccgaaactgatggctatcaaccacatttaataactcctgaacaaggatacccgcgtttgattgaatctacttta

SEQ ID NO: 49820 - DNA, 218 bp, Gossypium hirsutum
  Clone ID: LIB3197-010-P1-M1-H4
tttctagagcatttgaaaatgggaattattactggcctacttttctctcttttaggggcgccatacaaatacattgtacttaaaaagggatgtaacgtaaccattgatttcaattttcttgactcgaaaacattgtcagattaataatacaaattataattattcatttcaaaataaaaaaaaaactaatttttctaaaaatattttttaaatattat

SEQ ID NO: 49821 - DNA, 382 bp, Gossypium hirsutum
  unsure (1)..(382): unsure at all n locations; Clone ID: LIB3197-010-P1-M1-H5
aaaccctaagaaaatccagttagattgtcattcaaacctgaaaaatgggagtagagaagcaagtcatcaggcctggaaccggtcccaaacccacccccggtcagaccgtcaccgttcactgcactggctacgggaaaaatggagatttgtctgagaaattctggagcacaaaggatccagggcagcaacctttctctttccaaattggcaagggctctgttataaaaggatgggatgaaggtgtgatgggaatgcaagtggcagaagttgctcgtcttcggtgctccccagactatgcttatggtgctggtgggtttcctgcatggngaatacagccaaactcgggtctcgaattcgagattgaagttctaaatttgaagtg

SEQ ID NO: 49822 - DNA, 408 bp, Gossypium hirsutum
  Clone ID: LIB3197-010-P1-M1-H6
cgtcccctgggccccaactaaaataatcaaaacccattgtatctttctccttggttcactctgcagatcctcccccattcattcaaacaccaaatcaaaagttcattttgttccttttctcattgtcactctccacatcaatacttcccccaattttttttctaaaaacaatgtttcgaattcaactgttggtttcggttttgctttgttgcttcaccttttggttccacatttcatttgggtacttgataacgtgctcggggatagttccgatgaggtaccgcaacgataaggtatcgataacggatttcggcggcgtcggtgatggaaagacactcaatacgaaagctttccgggaagctatataccggattcaacatctgagaaaggagaggggggaccttgctt

SEQ ID NO: 49823 - DNA, 320 bp, Gossypium hirsutum
  Clone ID: LIB3197-010-P1-M1-H7
aaaccggagtcccgatcattttattaggaacagtaaaacacttccctactggagctggtagcaattacgtcaaaacgcccaaaattttggaaaaaaaaaacactttcatccacgacagcaaggatttctagggtttcgtctgaatcggtaagcgatggcgatggctgctctcagacgcgaagggaggcgtttcgcccctctgatctctcctcgtccgataaccgctgtcagatcctctcctctctatcctactcttgaggatgagggtcctcttggacttcgtcatatttcgactcaagttgttagaaaccggatgaaga

SEQ ID NO: 49824 - DNA, 402 bp, Gossypium hirsutum
  Clone ID: LIB3197-010-P1-M1-H8
agaaggtgtcttaataaacgccttctttcttgttcttctccctttctttgcttggtcgaatttttcttaagcgagaatgagagagtgcatttcgattcacatcggtcaggccggtatccaggtcggaaacgcctgctgggagctttactgcctcgagcatggaatccagcctgatggtcagatgccaagtgacaaaactgtcggaggaggtgatgatgcttttaacacctttttcagtgaaactggtgctgggaagcacgtccctcgtgccgtctttgtggatcttgaacccactgttattgatgaagtgagaactggtgcttaccgccagctctttcacccagaacaactcatcagcggcaaggaagacgcagctaacaactttgcccgtggtcactacac

SEQ ID NO: 49825 - DNA, 464 bp, Gossypium hirsutum
  Clone ID: LIB3197-010-P1-M1-H9
caacacccaaaatggcctacgccttgattacaattctactcctagccatttacggagcacacggcccaaagtgcagcaccaccaccagcaaccacagctccaccatcaatgctgccaccagcagccagagacttcctccaagcccacaaccaagcaagagctgcagtaggtgtcgcacctctcaaatggagccaacaactagccaatgcttcaagtctcatcgcaaggtaccaaaggaacaaaatgggttgtcagttcgcaaacctgacaaaccacaagtacggagcaaaccatttatggggtagcggagccgccgtgacgccgctcatggcggtggaaacttgggtaaaagagaaagattattatgatgatgggactaatacttgtgcaccgaatcataaatgtggtgtttatactcaagtggttggaagaatcttcggatttggtttgctacaagctacatg

SEQ ID NO: 49826 - DNA, 426 bp, Gossypium hirsutum
  unsure (1)..(426): unsure at all n locations; Clone ID: LIB3197-011-P1-M1-A11
gtttttcgttgttttttggggtttcctttatgtgatctcttattggataaatgaggaanagaantantaccaaggatgatgcanctcaatattaagagggttcctactgttgtttcgaattaccaaaaggatgaggcggaagagactgctcgccggagcggtggatttgggaagaattgccttagaagctgttgcattccaagagcaaagcttcctttatatgctttcaagaaggagagtgaaaaaaatgcatttgaaactgaaaacaaagagcctccaattgcttttcttgattctctcgttcttggggagtgggaggatcgcatgcaaagagggctctttcgatatgatgtcactgcctgtgaaaccaaggtgggtccttgtgaatatggctttattgcccagcttaaccagggccgtcacctt

SEQ ID NO: 49827 - DNA, 440 bp, Gossypium hirsutum
  Clone ID: LIB3197-011-P1-M1-A12
cttacgattatattgttcttctagtgggttctaattttctgtcacgggggagacaatgggagcttcattgcctccgaaagaagctaacctcttcaaactcatcgttaaatcatatgaaactaaacagtacaagaaaggactgaaggctgcagatgctatacttaaaaagtttcctgatcatggagaaacattgtcaatgaaggggttgaccttaaattgcatggatcgtaaaactgaagcatatgagctcgttcggttaggtttaaagaatgatttgaaaagtcatgtctgctgggacgtgtatggtctcctctatcgatcagatagagaatacagggaggctatcaaatgctatcgcaatgctttgagaatagatccagacaacattgaaatactacgggacttgtcactcttgcagatctgcagcagattcttcttct

SEQ ID NO: 49828 - DNA, 319 bp, Gossypium hirsutum
  unsure (1)..(319): unsure at all n locations; Clone ID: LIB3197-011-P1-M1-A4
gtcaaattccgaaaactgtactcagtcnttcaattgaagtcacccagtcggcggtggactccagctctggagaagagtcacatcttantgagtctgagatcaatgaatacaaaaagccatatgaagagattatgtctgggaagtacaaagtaaaggccttaaatggtagcttaagatgccccttttgtgctgggaagaagaaacaagactacaagtacaaggatctgcttcaacatgcttctggggttggtaaaggatctgccaacagaagtgcaaaacagagagcaaaccacctggccttggcaaaatatttggaaat

SEQ ID NO: 49829 - DNA, 429 bp, Gossypium hirsutum
  unsure (1)..(429): unsure at all n locations; Clone ID: LIB3197-011-P1-M1-A6
cggacgcgtgggctcccattttcttattgatgttgcagatcggttctctaatggtttggtcgggtgtancgttgtttatacgtttggttgttgttgaagaagtgctactaccatggctacaaagaagagcgttggggacttgaaggaagctgatttgaagggaaagaaagtgtttgttagagtcgatctgaacgttccattggatgataacttcaacataactgatgacacaaggatccgtgccgctgttcccaccatcaagtatttgatgggtcatggctctaaagtcatcctctctagtcatttgggacgcccaaagggtgtcactcccaagtacagtttgaagcctcttgtgccaaggttatctgaactccttggagtcgaggttaaaatggcaaatgactgtattggtgaagaaggtgagaaaat

SEQ ID NO: 49830 - DNA, 439 bp, Gossypium hirsutum
  unsure (1)..(439): unsure at all n locations; Clone ID: LIB3197-011-P1-M1-B10
gaagccgccatgggaaacgcttttctgttacaaggcggagattgtgcgcggagtgtcaaanagttcaacgctaataacatccgtgacactttccggatccttcttcagatgggtgccgttttgatgtttggtggtcaaatgcctgttatcaaggtgggaagaatggctgggcaatttgcgaagccgagatcggacccattcgaggaaaagaatggagtgaagctgccaagttatagaagagataatgtcaacggggattccttcgatgaaaagtctaggatccctgatccccaaagaatgattagagcttactgtcaatcagcagctactttgaatcttttgagagcctttgctacttgaggttatgctgctatgcaaagggttactcagtggaatttggatttcaccgaacacagtgagcagggggataggtaccgtg

SEQ ID NO: 49831 - DNA, 379 bp, Gossypium hirsutum
  unsure (1)..(379): unsure at all n locations; Clone ID: LIB3197-011-P1-M1-B11
ctccatcagagagatttaatcaatctgagcgagagangaaaatcacgagttcgtgataaagtgacngaaaatatatacaatgcatagatcgcgatctccattgctaatagctttatcatttctcttcacatccttcaccatctctaacgctctttacgggccgtcgtcgccagtggttcagctcactccatctaatttcaagtccaaagttttaaattctaacggagttgttttggttgagttcttcgcgccttggtgtggccattgccaaactttaacacctacatgggagaaagcctccaatgtcttgaaaggtgtcgctacagtggcagccctcgatgctgatgctcataagtctctttcccaagaataccggatt

SEQ ID NO: 49832 - DNA, 399 bp, Gossypium hirsutum
  unsure (1)..(399): unsure at all n locations; Clone ID: LIB3197-011-P1-M1-B4
ccctaaaccgccgccgccgccgccgcccgtcgaacgccgacnaaaatggctttggagggattagttctccgcggcaccatgcgagcccacactgacatggtcacagccatcgccactcccatcgacaactccgatatgatcgtcacttcctctcgcgacaagtccatcatcctttggcacttgaccaaagacgaaaagacctacggtgtcgctcgccgccgtctcaccggccattcgcactttgttcaagacgttgttctctcttctgactcccagttcgctctctccggttcctgggacggtgagcttcgtctttgggatttgaacgccggaacatccgctcgtcgtttcgtcggccacaccaaagacgtgctctccggtgctttttcaattgataac

SEQ ID NO: 49833 - DNA, 371 bp, Gossypium hirsutum
  Clone ID: LIB3197-011-P1-M1-B5
attttcagcagcaactttttccttttggcagtgaagtgaaacgatgccatactgctcgaggggtggcgaaaatgacgttgacgagttcgacgaattcgatccgacgccttacggtggtggatacaatctcgaactaacttatggtcgtcctttggaaccctccgatgagacttgctacccttccgctacaccctccgatggcgactttgattacgcacgtcccgatttctcttccggttacgcgcacttagcttatgccgacgaagccctcgaaactgaatacagtagctatcttaaacccaagccccgacctggacgattcgaacctgcacctgcttttggtgactatggaaggaaacctgaatatgagc

SEQ ID NO: 49834 - DNA, 244 bp, Gossypium hirsutum
  Clone ID: LIB3197-011-P1-M1-B6
ctaacttttagattccctttccattgcactgctctttctttctatagaattagtcactcctgttctagatgaaggttctctccccaattcttgcttgcctagcgcttgctgtggtggtaagccatgctgctctctcacctgagcaatattggagctataagctgccaaatactccaatgccaaaggctgtcaaagaaattctacatccagaactgatggaggagaaaagcacctctgtaaatgt

SEQ ID NO: 49835 - DNA, 390 bp, Gossypium hirsutum
  unsure (1)..(390): unsure at all n locations; Clone ID: LIB3197-011-P1-M1-C10
tctatcccccaaaaatggcaanttccagggtctccttcatcatcatcatggtcagcaccntcctttntccatccctctcttcacagctgtccgatctctttccttccaacaaccctccgcccttcctctgcaaacattctcacccaatcaaacaacccaaccaccaccaacaataccattattataacccgtatttttcccaaccgttagaccacttcatcttctttgacctccccaggttcccacaactttaccttattaacacttaacacttggtctgccctttcccttcctgcccaatcttcctttacttcggcaaccaaagttacatccaaatgttcccccttaacacccgttttttatttgacatctctccccccttcggtgcca

SEQ ID NO: 49836 - DNA, 409 bp, Gossypium hirsutum
  unsure (1)..(409): unsure at all n locations; Clone ID: LIB3197-011-P1-M1-C11
gcagcataggtactggctacnatcggtccgggaccactttgtctccggaggggcgcgttttccaaatcnagtaccccnccaaagccgtcnataacagcggaactgtggttggaattaaatgcaaagatgggatcgttatgggagtggagaagctgatagcatcaaagatgatgttgcctggttctaatcgaagaatccattcagtccatcgtcattccggcatggcagttgctggattagcagctgacggtagacaaattgtggctcgtgctaaatctgaagctaccaattaccaaagtgtgtatggtgaacccatccctgtcaaaaaacttgcttaacgtgtaacaagttatgtgcatttatgtaccctttactggtggctccggcctttttgctgtggcataattct

SEQ ID NO: 49837 - DNA, 425 bp, Gossypium hirsutum
  unsure (1)..(425): unsure at all n locations; Clone ID: LIB3197-011-P1-M1-C2
gaaaaaaatgaagctcttgtttctaactttggtgcttggttctcttcttctatggtctggagtttttgcaccaacaatggctcancctcgttcacctttttgtgaagggaaatgcaaagggaggtgcaataaagcggcggtttgggatcggtgcttcaaatattgcggcatatgttgcgaggagtgtcaatgcgttccgtccggtacttacgggaacaaacacgagtgtccttgctacagagataaggtgaacaacaagggcaaacccaaatgcccttgaaaatgaaatatattcgagttcgggatttaatcaagcttaaagatcgaggacgaagaggccatatatatatatatatatgcatgttgatgattatgttattataaaaataaacttggtntggtgctgttattttcctttgggtttt

SEQ ID NO: 49838 - DNA, 379 bp, Gossypium hirsutum
  unsure (1)..(379): unsure at all n locations; Clone ID: LIB3197-011-P1-M1-C3
gttgttgctaaccctgccaacaccaatncattgatcctgaangaatttgcacgggcaatgcctgcaaanaacattacctgtttgacaaggctggatcataacagggcactaggtcaaatctcagagaaactaaatgtccaagtttctgatgttaagaatgtgattatttggggtaatcattcatcatctcaatatcctgatgtcaaccatgcaactgttatgactccatctggagaaaagccggttcgcgagcttgttaaggatgatgcatggttgaatggagaattcataaccactgtccaacaacgtggggctgcaatcatcaaagctaggaaactctcaagtgcactatctgctgctagtgctgcttgtgatcaca

SEQ ID NO: 49839 - DNA, 398 bp, Gossypium hirsutum
  Clone ID: LIB3197-011-P1-M1-C4
taactcgctttccctttgattttttgctgacgctgactcattgagtccaaaattccaccagctccttccttcatcagccatgagccgtttcagggtaactgacatcttcgacccttactctccctctctctgtgttaaagaaacctccattctcgctcacaagcccttagcttttccctcatttttcgaagcagaacatgaacttagctccgccctcgacctactgagtcctttcccttgctttagccccttcgatatctacgacaacgtcactgatctggtccaaatcgagagaacgccgtcgtttcgttcgtacaagagggtacaacgccgagtcgaacccgagttttctattcaaaccttgtgcgaccgagttacggcgctggagtctaaattcg

SEQ ID NO: 49840 - DNA, 411 bp, Gossypium hirsutum
  unsure (1)..(411): unsure at all n locations; Clone ID: LIB3197-011-P1-M1-C5
attggtattttacaaattagagataattgtcgaaggatagagccatgagttgtgttggctgttgtgaanaaaataatatccacaatgccacagacaatggaggccaatacatggttaaaaactcagcaggaaatgttgggggttaccatacatctgaaactgcatcgaagagtgctcaaaccgtgaaggttcagcctattgaagtccctgctattttggcagatgaattgaaggaaatcacagataactatggtaacgatgctttgattggagaaggttcatatggtcgagtttattatggagttcttaaaagtggagaggctgcagcgataaaaaagttagatgccagcaagcaaccagatgatgaattnttagcccaggtttccatggtatcaaggttgaagcatgaaa

SEQ ID NO: 49841 - DNA, 433 bp, Gossypium hirsutum
  unsure (1)..(433): unsure at all n locations; Clone ID: LIB3197-011-P1-M1-C7
cgattttcgaattgaattttnggcgttgcgtggtaatagctgaggggttaagggatgtctgataatttctcgccgactctcagaatcggagatctcagtgatttcatagcaccgtctcaagcctgcgtcgtttctctcaaaggactcaaagcgacccctaagaaacctgaacctcatgttttagctggtaagagtcagcaaactgaaccagtaaaaatttcactcaaggattgcttggcatgtagtgggtgcataacctcagcggagactgtgatgcttgagaagcaaagcttaaatgaattcctttccaatattaataaagggaaagctgtaattgtatacctgtctccacagtcaagggcctnccttgctgctcactgtggcatacctccactaaaggttttcaagaaactcacaacttttttaaagtctt

SEQ ID NO: 49842 - DNA, 368 bp, Gossypium hirsutum
  Clone ID: LIB3197-011-P1-M1-C8
ttcattctttgctgttgaagtagtaatatcgatagcatacagagatggagaggcaaagaagcaagcaggtttgtttgttgatgtgggttttggttgctgcctttttctcccacaatagggtcattgcagtgacctccactggccttggtgagcagaaaaactactatccagctcctgaccctcatgctggaactcccccttcaggttcacatggcacaccaccatcttcaggaggtggatcacctccctctcatggaaccccgtcacatggaggtggttaccacccttcaccaacaccatcaacgccttcgggtggaaattgtggaactcccccacatgacccttcaactccatcaacaccatcacac

SEQ ID NO: 49843 - DNA, 406 bp, Gossypium hirsutum
  Clone ID: LIB3197-011-P1-M1-C9
caactacagagaagagagtaaaggggaaaaagagcgtcggtgttcttgcttcggtgttctacttcactctctctctttctccgaagttcctccttcgttcttttatttattcagtattgtaaaagatggccgacggtgaggatattcaacccctcgtctgtgataatggaactggaatggtgaaggccggttttgctggtgatgatgctccaagggcagtttttcccagtattgttggtcgtccccggcacactggtgttatggttgggatgggtcagaaggatgcctatgtaggagatgaagcacaatctaaaagaggtatccttactttgaaatatcctattgagcatggtattgtgagcaactgggatgatatggaaaagattttgcattatacattctacaa

SEQ ID NO: 49844 - DNA, 346 bp, Gossypium hirsutum
  Clone ID: LIB3197-011-P1-M1-D1
gtgttcaatatgctttgagcctaatcagaaatgctgctagggatcctctcacgtgtgatgagaaaaaccactcacgtattttcaaaggtgaaactcttcttcgtaggatgaacagatatggacttttggatgatagtcaaaacatgctctagtatgtattggctttgactgttgagaacttccttgaacgctcgcttgcaaacactagtgttcaagactggtatggccaagtcaatacaccatgctcgtgtgttgattaggccacgtcacatcatattcggaaggcacgtggctaacattccattctttattgtgaggggtgacttccagaaacatatcgacttct

SEQ ID NO: 49845 - DNA, 431 bp, Gossypium hirsutum
  unsure (1)..(431): unsure at all n locations; Clone ID: LIB3197-011-P1-M1-D2
cttactctttgtaatagtcttttatgctttggtttcttttcgtttctctccgggatggtcttttcattcacaactggaaaaaagtcagcgccgccgtcctttcctcctctcgtgcctgtgcgtttccttttccgatcgtttgctcaacaaaataaacagctgtattcggtgtttggtaactttctacgttgattttgggagtaactgaaaatggctgcaggggactgggatctatatgcggtggtgaggagttgtacgtncgccaccaacacatncacctncgccgtatcaggcaactatttctcgaatgggaataatgatagttggcgggaagaccctttagcttgcttagcttcgttgacgtttgaggaagaagatgatcccgttacatttcctaatcttaaaaaaagtggttctttacaagattctta

SEQ ID NO: 49846 - DNA, 326 bp, Gossypium hirsutum
  unsure (1)..(326): unsure at all n locations; Clone ID: LIB3197-011-P1-M1-D3
cggacgcgtggggttcatctaagtccaangagcggtagctncaagggtatggggaagaagctanacncnttncttggaaaaaggttcaagccctacaagttgaaatcacttattagtgttgccctttctcgtctttccgttttcaagaatcggcgtcagattcgcagcaaccaagctcgctctgatgttgtggagctccttcagctcggccaccatgatcgtgctcttcttagagcggagcangtggtgaaggagcaaaacatgttggacgtgtttggtatcctggaagggtattgtaatctcctcattgaaagactccatctcat

SEQ ID NO: 49847 - DNA, 384 bp, Gossypium hirsutum
  unsure (1)..(384): unsure at all n locations; Clone ID: LIB3197-011-P1-M1-D7
aaacactctctcaacttctctctgagtccctgtcttctcttctctggggctcgcctcttcnattctttcctttcctttccctccactttctctccaattttcctttctctttccctctctttctcaggtccttgcaaatggcggaagcttctaaagtcattcatgttcgcaacgttggccatgaaatttctgaaaatgatttgcttcaacttttccagccatttggagtgataacaaagcttgtaatgctccgtgcaaagaatcaggctcttctccaaatgcaagatattccttcagccatcaatgcaatgcagttctacactaatgttcaaccaactatcanggggaggaatgtgtatgttcaattctcatcacatcaagaac

SEQ ID NO: 49848 - DNA, 303 bp, Gossypium hirsutum
  Clone ID: LIB3197-011-P1-M1-D8
gtcttgggctggtgcattttattagtggttagttttgtgacattagcgaaaacttgttaaaaggtgggtgtggatttgttagtcgcacttttcattaacatgcattctttctataacttaaaccagtgaatttatcatcacatcatcatcatcatcttcctattcctttctttttggtggtaaatttgtcagattctcactagaaactgttaatgattgtactcaagtggtcttttttttgccttttactatttggttctcatttatcattacagaacataaccagattgaagtattgttttg

SEQ ID NO: 49849 - DNA, 434 bp, Gossypium hirsutum
  Clone ID: LIB3197-011-P1-M1-D9
cctgcaaatacacaaccataattccctattctacccactcttttcttttttctctcgttcatcttattaggtaatagtttatatacattagcggaaacttattaaaaacatttttttcatatttttaatctcactttttattaacattctttttttttataacttaaaccaattaatctataattacatcatcatcatcaatatactataccttttattttttttctaaatttttctcatcttcactactatactcataatattatactcaaaaaatctaatttttttctcatactatttatatctcatttattattacattaacttaacctatatttaatttctttttttcctatattttcctaacctttatttaattattttctactctttttatttacttaatttattataccactttctatcataattta

SEQ ID NO: 49850 - DNA, 203 bp, Gossypium hirsutum
  Clone ID: LIB3197-011-P1-M1-E1
atactttcttggtcttcatatgttttcctgctgaacgaacatcagagatgatgagttcatccctcaacgaataaacttgaagtgaaacaattaagagaagatgtcgtggccagcacatgtcgatgatcactttatgcgcgatatccacgtcaaccatctatatcgcgccgctatcattgaccacaacggcatcgtttggtgcc

SEQ ID NO: 49851 - DNA, 263 bp, Gossypium hirsutum
  Clone ID: LIB3197-011-P1-M1-E2
ggagaaggtttttttcctgcaggaattattgggtaaaaccaaaatctgagatgggggtttcttggtaacaaccctaatttttgctgggattgggataattgcatctttttgtaccaaaatctgctgcaaccgaggtccttttgttaatctgctccatctaacattggttatcacagcaactgtctgttgttggatgatgtgggcaattgtatatcttgcacaaatgaaacctttcattgtccccattttgagtgaaggggaat

SEQ ID NO: 49852 - DNA, 430 bp, Gossypium hirsutum
  unsure (1)..(430): unsure at all n locations; Clone ID: LIB3197-011-P1-M1-E3
aagaaaccaaatttgggttttcagttnttattgacgtgcantgcatggagctgcgactgggactcnctcttccacctccttttaattcccatcgaaaccttcgacctaaacagctatggtaattacgagactagagaggctttgggttccaatgctttgagttggcctctgctaaaactaggaccagctgacaatgacattaacaacatccaccaccacaacagcagcagcagcagcagcagcagctctagcggcggcggagctggctgcaaaaaaacgcagctttgatgaagcaccattcttcgatgagaagagaaatgttcccaaaacgctgcatcttttgctttggactaaccaaccaaatgatgaagacgacgaccctaacaatgtccttcacgaaaattcttcttctggcattttcaagaatgat

SEQ ID NO: 49853 - DNA, 313 bp, Gossypium hirsutum
  Clone ID: LIB3197-011-P1-M1-E7
catccccattcccatcccccaccccccccttatttttttttactccaagaattactgcgtaaatcacatcacagaagaggtgcatatcaaaataacaaccctactttttcctttcattcatataatttcctccctttaaaccaaaacctcctgccccctcacatccctcttctaatctactccctctaacataatcaatcacagccactttctcttccttccttatatccccaattatatatctttcacaaattaaacctctcattctccccatttttaataaattttactcaacatctttacacattatttt

SEQ ID NO: 49854 - DNA, 311 bp, Gossypium hirsutum
  Clone ID: LIB3197-011-P1-M1-E9
cttcgattccaatagagatagagagagaggaggagatcttcgcttgtctccggcgttctgctccatttgataaccgcttgcagttctctcagtgcttgacagacgtgaaaaatggggttgtctttcacaaagctattcagccggcttttcgccaagaaggagatgcgtatactgatggttgggcttgatgctgctggtaaaaccaccattctttacaagcttaagttgggagagattgtcactaccattcctaccatcggtttcaattgtgagaccggggaatacaagaacatcagcttcacggtttggga

SEQ ID NO: 49855 - DNA, 353 bp, Gossypium hirsutum
  Clone ID: LIB3197-011-P1-M1-F1
cttctatctatccaagcccaaacacctcttttttcgcgaaattttctaagttttagccatttagaaaaaaagctttttgttgttgaaggccatgactatgagtaacaatattgggcaatttggtgacacaactttaaccaaagttttcgttggagggttagcttgggaaactcccagagaagccatgagagagcactttgagaagtatggtgagatccttgaagctgtgattatttctgataaagtcactggcagatccaagggttatggattcgttacgtttaaggaagctgaagctgctaagaaagcttgtgaggatgctaaccctatcataaacggccgccgagctaact

SEQ ID NO: 49856 - DNA, 352 bp, Gossypium hirsutum
  Clone ID: LIB3197-011-P1-M1-F2
gaaaatcgccgaggaaaaatgcagcacctgaggctgagagcaacagcaacaaggggtgaggcaacaagctctcctccaacaacagtctctctatcaccctggcatcttagctcctccacagatagagccaatcccaagtggaaatctgcctcctggttttgatccaagtacttgccgcagtgtgtatgtgggaaacatccattcacaagtgactgaaccactactccaagaggtttttgcaagtactggtcctgttgaaggttgcaagcttatcagaaaggaaaagtcatcatacggattcgtccactactttgatcgtcgatcagctgctctcgctatattgtctctaaat

SEQ ID NO: 49857 - DNA, 347 bp, Gossypium hirsutum
  Clone ID: LIB3197-011-P1-M1-F3
caaattgttatctctgaaggtgtcttaataggcgcctgcgatttaccttcgatgtccatgtacttctctattgctacgtttttgaatttttagtgagcgaaaatgagagagtgcatttcagtccacatcggtcaggctggtattcaagtcggaaatgcctgctgggaactttactgccttgaacatggaatccagcctgatggccagatgccaagtgacaagactgtcggaggaggtgatgatgcttttaacacctttttcagtgaaactggtgctggaaagcacgtccctcgtgctgtctttgtggatcttgagcctactgttattgatgaagtgaggactggtac

SEQ ID NO: 49858 - DNA, 401 bp, Gossypium hirsutum
  unsure (1)..(401): unsure at all n locations; Clone ID: LIB3197-011-P1-M1-F8
caaacaggacagatgaacanaattggagaacgagttacttggattgcggagtggagaaatctattgtatgttgattcttcanaaatgcctacaaagctctattcttcaatcttcccatctatcttctttctttccctcattttcctcttcctttactccactttccttcctctttataccaataacgactcctcttcattgcccactaataagttccttccttcatcctctcctccttgtaaccttttcaagggccattgggttttaaactccaccaaaggcaagcctttctacgatgacacttgcccctttcatcgaaacgcctggaattgtcttaagaacaagagggacaacatggggatcatcaattcctggaaatgggtacccaaagattgcaaatt

SEQ ID NO: 49859 - DNA, 442 bp, Gossypium hirsutum
  Clone ID: LIB3197-011-P1-M1-F9
cggacgcgtgggaagaaaaagagggtgtttagctttttttttaaaggggtctggagaaaatataagagttgagttggagagaagaagaagaagaagaagagaaaaagatggggttgatgatggatcaagtttgaaggcttggggggttagtataaaaataaaaatcacccctttcaaaaacctggaaaccccaccaaatggaacttacagatttgcaaagcaataagcaaaccaaaaacaacagcagcagcagcaacaataacaacaacaattctgcagaaccccaccatcagtctctccagcagcaccatctgcaacaccaaaaacagtcggcttctccccagcttgtggtcccttttgatggcaccagatcttcaagtgcttctttcggcaacccttttaatatgggctccatttctcaactccatccccaccacccttt

SEQ ID NO: 49860 - DNA, 431 bp, Gossypium hirsutum
  unsure (1)..(431): unsure at all n locations; Clone ID: LIB3197-011-P1-M1-G1
aaagggctctattttggggggttcctactactctaaagctgggtccagatcaggaggctatantctggcaacaacctggaacttcagcctgtgcagctttcttggccaacaataacacccgtctggcacaacatgtgaatttcaggggccaggacattcgcctgccggctcgttccattagcgtcctccctgattgcaagaccgtggttttcaacactcaactggtcacaactcaacataactcaagaaactttgtaagatcagaaattgcaaacaagaactttaactgggagatgtacagggaagtccctcctgtcggacttggatttaagtttgacgtgccaagggagctttttcatttgaccaaagatacaaccgactatgcttggtacacaactaaccttttgttgggtcggcgagatttaccaatg

SEQ ID NO: 49861 - DNA, 230 bp, Gossypium hirsutum
  Clone ID: LIB3197-011-P1-M1-G2
ggccggtgtgcttggcagcctcaaaaaaaggtggaggagagtctcggtaatcagagattggtgtgcttatcctcctcgtcatcttctatgtcatcggctgtgccgctttccgaaacaataaaaagattggtaacgatgaaccgtacggcgaggcaaggatgacgaaagcgcaaccaagtcggatccatttatagaagaccaagacatgttatgggagctttatttttctt

SEQ ID NO: 49862 - DNA, 402 bp, Gossypium hirsutum
  unsure (1)..(402): unsure at all n locations; Clone ID: LIB3197-011-P1-M1-G3
cggacgcgtggggtcctatttaaaactacacaaatcttgaagttcatacttcgtgacagggcaaggcacanctgtttagacatagacaaagagtcggtgacaaaattcattattggtttcatctttttttagtttccgcgtttgagcaaatacaagtccttttccttgtattcaaatccgaagaaaggattttctttgaagtatagaaaatcaatccatggttttccggaaatgcttacctgtagtccaccacactataaataaaactcatcaaccctatctttctttacttgtcacttacatttctcaattcaacaaaaaatatggctcagcctcactttctttgcatgttattggtccttggcttggcttcagctactgcttgtgatcgatgtgtgcacc

SEQ ID NO: 49863 - DNA, 363 bp, Gossypium hirsutum
  unsure (1)..(363): unsure at all n locations; Clone ID: LIB3197-011-P1-M1-G7
tctaggaattgttgaaatttttagagattatgtccttttaaattgtgggtttgtagattttnnaanacaanggaatgggggacaaggaggaggaagaagagtggaccgggacggaaagcggggatttgacatctgaagacgaatgaacggaagattaccggcggggcggttatcacgctgttagaatcggagacactttcaagaacggtcgttacgttgtacaaagcaagctcggttggggccatttctccaccgtttggctcgcttgggacactcaccgctcctgttatgtagctttgaaaatacaaaaaagtgcccagcattacactgaagcagcgattgattaaataacaatctttcaac

SEQ ID NO: 49864 - DNA, 412 bp, Gossypium hirsutum
  unsure (1)..(412): unsure at all n locations; Clone ID: LIB3197-011-P1-M1-G8
cttagaaggtgtcttaataaacgccgtctttgttcttcttctcccggggtttggtttttcnaatttttcttaaccgagaatgagagagtgcatttcgattcacatcggtcaggccggtatccaggtcggaaacgcctgctgggagctttactgcctcgagcatggaatccagcctgatggtcagatgccaagtgacaaaactgtctgaggaggtgatgatgcttttaacacctttttcagtgaaactggtgctgggaagcacgtccctcgtgccgtctttgtggatcttgaacccacttttattgatgaagtgagaactggtgcttaccggcaactctttcacccaaaacaactcatcagcggcaaggaagacgcagctaacaacttttcccctggtcactacactatttgc

SEQ ID NO: 49865 - DNA, 404 bp, Gossypium hirsutum
  Clone ID: LIB3197-011-P1-M1-G9
aaaaatataaaataaaataaaaaaagacgctagggatcccgatcccgatcccaatctcattctctccggcgacacctttctctaaccgtttccggtgagatctcgaggttggatccgatctcgacccgattcatagtgtctctttgacctagatccgaaccaccatggctccagtttcggctttggccaaatacaagcttgttttcttgggagatcaatctgtcgggaaaaccagtatcatcactcgctttatgtacgataaattcgataatacttaccaagctaccattggtattgactttctatcgaaaaccatgtacctcgaagatcggacagttcggttgcagctcttggatactgcttgacaagaaagattcaggagtcttattccaagttacattaag

SEQ ID NO: 49866 - DNA, 435 bp, Gossypium hirsutum
  unsure (1)..(435): unsure at all n locations; Clone ID: LIB3197-011-P1-M1-H1
gtgattttttatctgtgctttatcgcatcctggatttctgtttgtagttattgggcatttccgtatcctaacttcgtttattccagtgaaatgggtgcaggcctttttacatctgcattaggtgtttgatagttgcttcgtgactggaaactaataatataaaatatcatatgactatattgcacatttagtgatccattcatattgttactggaaccaaagccacatcatgtctaacaagttgtttcttcagctttggcaattcatgatagttctttttccaggtatagtcttatagggcatgtagtttaatttcaagcttgtttaaatgagttttatttctaaaatgactgaatagaatatcaaattttctgcatttctgatggactaataagngctgntctttggtctcttttcaatctgttcaactacttt

SEQ ID NO: 49867 - DNA, 363 bp, Gossypium hirsutum
  Clone ID: LIB3197-011-P1-M1-H2
ggaaaaagaaaatcaaaacccccaggtgaagagggtgaaaaccagcagcggcagaggcaataaaaggtgaagccaaagagagagagatatatacataataaaaaagacttttcaaaagaacacaactatggctgctcatagagaaggatcagatgcttcagtggaagccatggttgctcaagtcgaaaaacacccaatttcatcgatccttatcatcattgctatgcaaacagaagctttgccggtggtgaataagttccagttgattgaaaaccctcattcttcgtttccaaaaggggtcccttggatccattatcatggtgcatacaaggacatcataatcaatctagtttggcctgaaaa

SEQ ID NO: 49868 - DNA, 342 bp, Gossypium hirsutum
  unsure (1)..(342): unsure at all n locations; Clone ID: LIB3197-011-P1-M1-H3
gttcatagttgtccctcaacggtgctcntaggagtgagagaantggggatggcgagggagggagaaaagaaaaaaaaatcatctccaatttctcttcaacaattcatctccaatatcacccctttaattgatttggaaaaggaagctgagatatcagcttcaataagttcaggagcaacaagaaatttggatactgctcaaaagaggggctccacgattctaaatttgaagtgtgttcacgctcagacagggcttatggggaaaactctacttgagttccaatcgaccaaaggagatgttcttcctgctcacaagtttggaacccatgatgtagttgtccta

SEQ ID NO: 49869 - DNA, 164 bp, Gossypium hirsutum
  unsure (1)..(164): unsure at all n locations; Clone ID: LIB3197-011-P1-M1-H7
attaccctctaagtttaagcgtatcatttttctgaggaaaatgaacttaccaaaatttccctaataacatctacctaacctttaaaaacccaccttgataatctntctccatcggcgtccgaattgtagtctttataatcgtcctcagctacagaccaatccca

SEQ ID NO: 49870 - DNA, 149 bp, Gossypium hirsutum
  Clone ID: LIB3197-011-P1-M1-H9
ctgacgcgtgggtttgcagttcattggaataagaaacacacaataaggcggtgggctacaaagatgatctattacttctcagacggagctctttctactgtgctaactatcatgttttccacagtgcaataaaaatatgtttatagtct

SEQ ID NO: 49871 - DNA, 396 bp, Gossypium hirsutum
  Clone ID: LIB3197-012-P1-M1-A10
cggacgcgtgggcagcctttaaaggttctgctcctatcaatctttcagatcgtctgaaccaagtgcttcgatgggctcttggttctgtggaaattcttttcagtaggcattgccctatctggtatggttatagtggtaggctcaagtggcttgaacgattcgcatatgttaacacaaccatctacccggtcactgctattcctcttctcatgtactgtacactgccagcagtctgtctgctcactaacaagttcattattccacagattagtaaccttgcgagtatatggttcatatccctctttctttccatctttgcaactggtattttagaaatgaggtggagtggtgtgggaattgatgagtggtggagaaatgaacagttttgggttattg

SEQ ID NO: 49872 - DNA, 409 bp, Gossypium hirsutum
  Clone ID: LIB3197-012-P1-M1-A11
ctatttttttcaaaagatcccacagccatctcataatctgagccgagtgtcggaggcctgaaaacgaaccctaaacgatgggtcagggaacaccgggcggtatgaataggcaaggtttcccaggggaccggaaacccgatggctctgataagaaggataagaaatttgagccagcggcgcccccagccagggtggggcgcaagcaacgaaaacagaaaggacctgaggccgcggctcggcttccgactgtaacgccgctgacgaagtgtaaactgcggttgctaaagctggagcgggtcaaggattatttactgatggaagaagagtttgtggctaaccaggaaaggctcaagcctcaggaagagaaagccgaggaggatcgatctaaagtcgatgatttgagagggtc

SEQ ID NO: 49873 - DNA, 402 bp, Gossypium hirsutum
  Clone ID: LIB3197-012-P1-M1-A12
cccacgcgtccggttatctctgagggtgtcttaataaacgccttcgatttactttcggtttccatttacttctttatttctacgtttttgaatttttagtaagcgaaaatgagagagtgcatttcagttcacatcggtcaggctggtatccaagtcggaaatgcctgctgggagctttactgccttgaacatggaatccagcctgatggccagatgccaagtgacaagactgtcggaggaggtgatgatgcttttaacacctttttcagtgaaactggtgctggaaagcacgtccctcgtgctgtctttgtggatcttgagcctactgttattgatgaagtgaggactggtacttaccgtcagcttttccaccctgagcaactcatcagcggcaaggaagac

SEQ ID NO: 49874 - DNA, 408 bp, Gossypium hirsutum
  Clone ID: LIB3197-012-P1-M1-A4
gtttcgcttgtggtattggtggaaggggtgtgagagagaagttgctgatgctgccaagggtagttcggaggaacagaagagcgaaagcattatgcgactttcatgggcgcttgttcactctaggcaagctgaagatgtgcagcgtgggatagctatgcttgaagcatcattggccaatagcagctctccgttgcagcagagggagaaaatttaccttctagccgttggatattacagaactggtgaattctcaaggagtcgacaacttgtggggcagtgtctggagattgcacctgattggaggcaagctctagtccttaagaaagcagttgaggagcgcattgctaaagatggtgttattggaattggtatcactgctactgctctggggcttatcgccggtggaat

SEQ ID NO: 49875 - DNA, 170 bp, Gossypium hirsutum
  unsure (1)..(170): unsure at all n locations; Clone ID: LIB3197-012-P1-M1-A5
gaaggaaaaaaaaacagagccagcggcgcccccagccagggaggggcgcaagcaacgaaaacagaaaggacccgaggccgcggctcggcttccgactggaacgccgctgacgaagngnaaactgcggnngctaaagctggagcgggtcaaggattatttactgatggaag

SEQ ID NO: 49876 - DNA, 396 bp, Gossypium hirsutum
  Clone ID: LIB3197-012-P1-M1-A6
ccgattaggagggttacaagtaggtgaaatggaacgtgattgtctaattgcttatggggccagtatgttgatttttgagcgcctgatggtatccagcgatccttttgaagtccaggtctgcagaaaatgtggattgttaggatactacagccataagctgaaaacagggatttgttcttcatgtaaaaatggagatgatgtttcaaccatgcaactaccatacgcttgcaagcttttaatccaggaactccagtcaatgaatatcgttccgcgtttgaaattatcggaagcgaattaatggtatgttcagattatttggtgttaatggtgtatctgaaaatttggtagctatagagcagatggttgggatgtttttgggaggaagaattctgcacc

SEQ ID NO: 49877 - DNA, 414 bp, Gossypium hirsutum
  Clone ID: LIB3197-012-P1-M1-B10
cggacgcgtggggtgagcaatggctaagaatgtgggaattcttgctatggatatctacttccctcctacctgtattcaacaggaagcattggaggctcatgatggtgctagtaaggggaaatacaccattggacttggacaagattgcatggccttttgtacagaagtggaagatgttatctctatgagtttaacagctgttacttcactccttgcaaagtataagattgaccccaaacaaattggccgtcttgaagttggtagtgagactgtgatcgacaagagcaagtccattaagaccttcttgatgcaaatctttgagaaatctggaaacactgacatcgaaggggttgactcaactaatgcatgctatggagggactgcagctttatttaactgtgtcaattgggttga

SEQ ID NO: 49878 - DNA, 398 bp, Gossypium hirsutum
  Clone ID: LIB3197-012-P1-M1-B12
cggacgcgtgggcggacgcgtgggggtctcacagctcaccgagcagtcacccatggggctggggtcaagcttgacggaagtggccagcaattaaacctcttgattactgctgcttcaggtggtgtaggtcattatgcagttcaactagcaaagcttggaaacacacatgtaacagctacttgtggggctcgtaatctggattttgtcaaaagcctcggagcagatgaggttcttgactacaaaactcctgacggtgcagctctgaaaagcccttccggtcgcaaatacgatgcagttatccactgtgcttctggtattccttggtctacctttgaacctaatctaagttcaaacgggaaggtaatcgacataacccctggtcttagtgctttcctaac

SEQ ID NO: 49879 - DNA, 415 bp, Gossypium hirsutum
  Clone ID: LIB3197-012-P1-M1-B5
tcagtctcttctgggatttgcttcaacagacaacccccccccaaaaaaaaccttgaactttttccgcagtcaaaatgggtatttctcgtgattcgatgcacaagaggcgtgccactggaggtaaaaagaaggcttggaggaagaagagaaagtatgagcttggaaggcaaccagcaaacacaaagctttcaagcaacaagacagttagaaggattagggttcgtggtggaaatgtcaagtggcgtgctctcaggctcgacactggaaactactcgtggggaagtgaggctatgactcgtaagacccgaattttggatgtggtgtacaatgcatccaacaatgagttggttcgtactcaaactctggttaagagtgctattgttcaagttgatgctgcaccattcaagcagtggta

SEQ ID NO: 49880 - DNA, 406 bp, Gossypium hirsutum
  Clone ID: LIB3197-012-P1-M1-B6
cttaaagcctgccatataatcatataaccaggctccgtcgtggtactcttcggccaccacaatgccgaaaatcgccttgggaacaagccaagaggctgctcagcctgactgcatcaaagcccttgtggtcgagtttatcaccactttcctcttcgtattcgttggagtaggagctgccatggccgccgatgagtcgggggcaaatgcgctggtgggattgtttgctgtggcggtggctcatgcccttgtcgtcggcgttatgatatcggccggacacatatcaggcggccatcttaacccagccgtcacgcttgggttgctattcggtggtcacatcacggtggtccgtgcgatcctctactggatcgatcagttgttggcatcttcagctgcttgtatacttctc

SEQ ID NO: 49881 - DNA, 400 bp, Gossypium hirsutum
  Clone ID: LIB3197-012-P1-M1-C10
agcctacttcctctccttcagaagatcgcattgttgcaagtcctcttgcacgaaaattggctgaagaacacaaggtacctctctcaagtatcaaaggaacaggtcctgatggacacattgtaaaggctgatattgaagattatttggcttcacgcgggaaggaagtttcagcaccaactcctaagacaaaggatgcaaaacttgcagctttagattatgtggatatccctcattctcagataagaaaggtcacagcatcacgcttattattctcaaaacagactataccacattattatttaacagtggatacatgtgttgacaaacttatggatttgcggagccaactcaactcattacaagaagcttcaggtgggaagcgtatatctgtcaatgatct

SEQ ID NO: 49882 - DNA, 397 bp, Gossypium hirsutum
  Clone ID: LIB3197-012-P1-M1-C11
cggacgcgtgggttttgattgcacaaaaccaagatcatctttgctttgctattgtggttcgttttgctaagaactggctaacgcacagcaaaaaatcgtggaggaaaccaacaagaaccaagcggtggttcttgccctctatgaagccttaaacacacgagacgtcaacaccgttcaccaaatccttgctcccgatctagagtggtggttccacggtccacccactcaccagtttttgatgcgcttactcaccggcgcttcatccgacgatcctttccttttcgaggtcgaccctgttttagtcaccgcctttggatccaccgtcatcgtcgaaggctgtgacaacagccgttcgatctcctgggttcacgcttggactgttcgtgatgggacaatc

SEQ ID NO: 49883 - DNA, 394 bp, Gossypium hirsutum
  Clone ID: LIB3197-012-P1-M1-C12
catacaccttgcttttctcttggatatgggtagccctttacaattccatatgtgggtttaatccttatactttatttttcatgttcatttcgtcagtttcttgcttatattaagtttctgccgacaaaatataagataaaaagggggtttattggcattgctacctattgctatttttttaccacttcaataatatatgggctgaggtgcacatttcatgggaggtgtagaggatgattaaccagcctcaaaacgcatgaaactattctttgaagaattgatacatctttcaaacggatcaactgctaaagagtctatagttgggtcttcaatagacttgatagatcggcccctgcattctgatgggggcgaaaaagatgttggttcaaaaaga

SEQ ID NO: 49884 - DNA, 406 bp, Gossypium hirsutum
  unsure (1)..(406): unsure at all n locations; Clone ID: LIB3197-012-P1-M1-C4
gaaagatcaagatcggaatcaatggatttggaaggatcgggcgtttggttgcgagaggtgctctccaaagcgatgatattgagctcgttgctgttaacgatcctttcatcaccactgaatacatgacgtacatgtttaagtacgacagtgttcacggtcaatggaagcatcatgagcttaaggtgaaggactcaaagacccttctctttggtgaaaagcctgtcacagttttcggtatcagaaaccctgaggaaatcccatgggctgaggctggagctgagtatgttgttgagtctactggtgtttttactgacaaggacaaggctgctgctcacttgaagggtggcgcgaagaangttatcatttctgctcccagtaaggatgctcccatgtttgttgtgggtgt

SEQ ID NO: 49885 - DNA, 405 bp, Gossypium hirsutum
  Clone ID: LIB3197-012-P1-M1-C5
caaacacattttatcaactgttttctcgtcaaacgacatagttcaagccaataaattcattgatcatatgttatcggacgatgtcccgctgatggtttcgaggcagcttttacaaactttcgcacatgaattagagagactgaagccagatgctcaaaaggaaatttcccattatacacttgatcagattcagcctcgtgtcgtttcattcgaagaacaggtattgtttattagagagaaacttgctgagttgtatgaatctgagcagcagtgctcaaaagcagcgcagatactaagtgggattgatttagattctggaatgagggttattgatgacacattcagattgtcaaaatgtgttcaaattgctcgtctatatcttgaggatgatgatgctgttaatgc

SEQ ID NO: 49886 - DNA, 413 bp, Gossypium hirsutum
  Clone ID: LIB3197-012-P1-M1-C6
cggacgcgtgggtttgagaactatattctctttctaaaaatacaacaaaatattaattaggatatatggcaggtgattcagggaagaaggaagagatgtcaaaggtgaaaatcatcagcacaagtcatgtgaagcctggaaagatgataggaagaaaagaatgtcaattggttacttttgatctcccatatttggcattctattataaccagaagctgttgttttacaagtgtggggagtttgaggcgaaggtggaaaaactcaaggatgggctgagagtggttttggaggagttttatcagctagcaggcaagcttggtaaagatgagaatggggttttcagggtggaatacgacgatgatatggacggtgtaaaggtggtggaagccaccgccatggagatcggcatagag

SEQ ID NO: 49887 - DNA, 407 bp, Gossypium hirsutum
  Clone ID: LIB3197-012-P1-M1-D10
cttggtttggccactttgatgggaaaaaggaaaaaagaggcagaaatttagagaagttgattcaaacagaaagggtgatggaactgagcattcagaaaatagaagccttgattaggctaagtacgatagtgatgttggttttaacagcttgtttaattgggttggattctcaaacaaaggtcatcttctacgttcaaaagaaagcttctttcaaggatttgcgtgctcttgttggattgctgtatatcacttcattggctgctgcttataatctacttcaactatgctgttcttcattctcagcttcttacaaaggaacctcgctgcaatcttacgcatatctggcttggcttcgttatattttggatcaagcagtagtgtacgcagtgtttgcgggaaacctagcg

SEQ ID NO: 49888 - DNA, 417 bp, Gossypium hirsutum
  Clone ID: LIB3197-012-P1-M1-D11
agaaaatatcacaaatcttcttctccttctcagaaatcttagtatcatcactatggcctcaaatcccaaggtcttctttgacatgacgatcggtggtcagcccgctggtcggattgtgatggagcttttcgcagattgcactcctcgcactgcggagaacttccgtgccctctgtactggcgagaaaggcgtcggccgcagcggtaagcccctccactacaaaagctcttctttccatcgtgtgatccctaactttatgtgccaaggaggtgacttcaccgccggaaacggtaccggaggtgaatccatctacggatcaaagttcgctgacgagaacttcatcaagaagcacactggtcccggtattctctcaatggctaacgctggaccgggaactaacggatctcagttcttcat

SEQ ID NO: 49889 - DNA, 416 bp, Gossypium hirsutum
  Clone ID: LIB3197-012-P1-M1-D4
ctttttcccaatttctcgaatctagggttttacattctccttttcctctccaaatcaaccttatttcattttttttcttctcttagaaataatatcgtcaatgagcaacgaattagttaacttcaacatgtccggtcttggcgatgctcttaatgccgaagcacgagctggtctcgttaacgctctcaagaataaacttcaaagtcttgctggggatcactccgatgtgctggagagcctatcaccgattgtcaggaagcgtgtcgaggttcttagggagatccagagccaacatgatgaattggaggctaggttttttgaggagagggctgcacttgaagctaaatatcaaaaactatatcaacccttgtatgcaaagcgatatgatattgtgaatggccttgctgatgctgaag

SEQ ID NO: 49890 - DNA, 417 bp, Gossypium hirsutum
  Clone ID: LIB3197-012-P1-M1-D5
caggtcttggtgacattggttaattcatattgggtaatcatatcaagtctttatgcggccaggaggctgcacgatgccatgcttacttccatacttagagctccaatgaccttcttccacaccaacccacttggacgaattattaatagatttgcaaaggatttaggtgacattgatcgaaatgtcgctccattcgtcaatatgtttttgggtcaagtgtctcagctcctttctacttttgtcttgataggagttgtgagcactatgtcattgtggtccataatgccacttttggttttgttttatgctgcttatttatactaccagagtactgcacgtgaagtgaagcgcttagattctgtaactagatcacctgtatatgcacaatttggagaagcactgaatggtctgtctact

SEQ ID NO: 49891 - DNA, 309 bp, Gossypium hirsutum
  Clone ID: LIB3197-012-P1-M1-D6
gaaaaatggcgactgtacttgttcatgaacgaagagattctaatataggtgtgaagcggattctacaagctgttcatggcgagctctttaaggtactaccggtataaaatctgaagacatacgctacctttgacgtcataataaggaattacagcaacgtaaagggtactcaaagctcgagtttactgatctgacacatgctctatacatggcttgtaaatgctcagaaaaaagcaacgcaaggctttcttgcatatcagtgcaacaaatatggtgaaaacataccatgctctggagctagtaagaatc

SEQ ID NO: 49892 - DNA, 418 bp, Gossypium hirsutum
  Clone ID: LIB3197-012-P1-M1-E11
ctcgaacagatgacacatctgccttttacaaggtgcccttttcaaatgttgtatatattgagcgctcagatttccggatgaaagattctaaagattactatggattggctcctggcaagtcagcactgctaagatatgcattcccaataaagtgtacagatgtaatattggcagatgataaagaaactgtgcttgagattcgagctgaatacgatccttccaaaaaaagcaagccgaagggggttctccactgggttgctgaaccgtccccgggttctgatccattgaagattgaagtccgattgtttgacaaactctttaattctgagaatcctgctgaacttgataattggctcactgatctcagcccgaattccaaagtggtggtacctaatgcatatgcagtgccatcacttgg

SEQ ID NO: 49893 - DNA, 418 bp, Gossypium hirsutum
  Clone ID: LIB3197-012-P1-M1-E12
ctcccaaacatcctaaatctcgtcttcgtcgccgacgccgaaacgccgctctctgcagccgcttgcccgggaacgcacccaatttcaaaaaacggcttccgtttctcatcccttggcctaaccaaactcctcgattccccgttctcgtctctccttcactgattccatcctcgaaaatggctttcatttgcttttagggtttgtaaaatcaaacccattagtttccgaacccaatctgtaccatttattgttctactttatccaattcatcaatatggctatccgtttcaccgtcagtttctcgggctacgtcgcccaaaacttagcctccaccgccggttcccgtctcggttcttgcccttcccggtcagtccacgaatgctggctccggtctcgtttcctttccgccaaacaaaaa

SEQ ID NO: 49894 - DNA, 351 bp, Gossypium hirsutum
  Clone ID: LIB3197-012-P1-M1-E4
cggacgcgtgggttacaaggcccttcttgatgttggtaataccccttcaaactatgggttcgtagaagcaacgagaggctgctgtggcacagggactgtagagacaactgaattcttatgcaatccgcatacactgggaacttgtcccaatgcctcccagtatgtgttttgggacagtgttcatccatcgcaggctgctaatcaggtccttgcagatacattgattgttcagggcattcccctcctttgattcgccaggacaccgtgtctacttgccctttttaaactgtactaagatctgtcactactcctttttctattatcttaatcaaaaagtgactcgtattgtag

SEQ ID NO: 49895 - DNA, 377 bp, Gossypium hirsutum
  Clone ID: LIB3197-012-P1-M1-E5
gtttctatacagattcagaaagaaataaaggaagaggaagcaatggccactcttacagtgcccacgacagttccttcggtgtctgaagattgtgaacagctaagaaaagccttttcaggatggggaactaatgagggcttaatcatagatatattgggtcacagaaatgccgagcaacgaaacttgattcgaaaaacctacgctgaaacctatggagaggatctcctcaaggcactagacaaggagctctcgaatgactttgagaggctggttttgctttgggctcttgatcctgctgaacgtgatgcccttttggctaatgaagccaccaaaaggtggacttcaagcaatcaggtccttatggaaatagcttgcac

SEQ ID NO: 49896 - DNA, 414 bp, Gossypium hirsutum
  Clone ID: LIB3197-012-P1-M1-F10
gtgaccggtgattcgtgagtattgtaaacaggagcagcagcaatggagctggtgtacttcgtggtgttcggggcattgggagcggtggtggcagcattagagctaagcaagaacagcaaagatcgaatcaacacatcctctgctttcaattccttcaagaacaattatcttgtcgtttattctctcatgatggctggagactggctgcagggtccgtatgtttactatctttacagtacatatgggttcggaaaaggtgaaattggacaactttttattgccggttttgggtcctctatgttgttcgggacaattgtcggatctttagcagacaaacagggccgaaggagggcgtgtgttacttactgcataacttacatacttagttgcataacgaaacattctcctcaatac

SEQ ID NO: 49897 - DNA, 435 bp, Gossypium hirsutum
  Clone ID: LIB3197-012-P1-M1-F11
atcagattcagaaggggctgctcgctctcggcgactacatgaatgtccagtgccatgcctgcattggaggcaccaatgttggggaggacatcaggaagctggattatggacagcatgttgtcgcgggcactccagggcgtgtttttgatatgattcgtcgcagaagcttaaggacacgtgctatcaaaatgttggttttggatgaagctgatgaaatgttgaataaaggtttcaaagagcagatctatgacgtgtacaggtacctgcctccagccacacaggtggtgctcatcagtgccacgctgccacacgagattctggagatgaccaacaagttcatgaccgacccaatccgcatcttggtgaaacgtgatgaattgactctggaaggcatcaagcaattttttgtggcagtggagagggaagagtggaaat

SEQ ID NO: 49898 - DNA, 390 bp, Gossypium hirsutum
  Clone ID: LIB3197-012-P1-M1-F12
caaagtgaaatattgctgagagtttgtggagatgagtgccttgagtgagggtcttacccaaattgtgatccctttagcttccttggtgggcattggttttgctttgcttcaatggtttttggtctctagggtgaagctattatcacaggattcaagcaatggatataaacaaaaactgattgaatctgatgaagaagaagagggtattaacaatcttgagatttccatcaagtgtactgagattcaacatgccatttctgttggtgcaacctctttcctctttactgaatacaagtatcttggtatcttcatgtgtgtatttggtgctatcatattcctcttgcttgggtcagatgagggcttcagcaccaaaagcgaatcatgcacata

SEQ ID NO: 49899 - DNA, 419 bp, Gossypium hirsutum
  Clone ID: LIB3197-012-P1-M1-F3
atggcagaacctggagccgttgttcgagcagtacatcaacaacctcaggaggcagctggacagcatcgttggggaacggggccgcctggactcggagctcagaggcatgcaggacctggtggaggacttcaagaacaaatatgaggatgaaatcaacaagcgcacagcagcagagaatgaatttgtgactctgaagaaggacgtggatgctgcctacatgaacaaggttgaactgcaagccaaggcagacactctcacagacgagatcaatctcctgagagccttgtatgaagcagagctgtcccagatgcagacccacatctcagacacatccgtggtgctgtccatggacaacaaccgcaacctggacctggacagcatcatcgctgaggtcaaggcccaatacgaggagattgctc

SEQ ID NO: 49900 - DNA, 411 bp, Gossypium hirsutum
  Clone ID: LIB3197-012-P1-M1-F5
gttatctctgaaggtgtcttaataaacgccttcgatttaccttcgatttccatttacttctctattgctacgtttttgaatttttagtgagcgaaaatgagagagtgcatttcagtccacatcggtcaggctggtattcaagtcggaaatgcctgctgggaactttactgccttgaacatggaatccagcctgatggccagatgccaagtgacaagactgtcggaggaggtgatgatgcttttaacacctttttcagtgaaactggtgctggaaagcacgtccctcgtgctgtctttgtggatcttgagcctactgttattgatgaagtgaggactggtacttaccgtcagcttttccaccctgagcaactcatcagcggcaaggaagacgctgccaacaacttcgctcgt

SEQ ID NO: 49901 - DNA, 417 bp, Gossypium hirsutum
  Clone ID: LIB3197-012-P1-M1-F6
cgacggaccgggcccaagtcccctggaaaggggcgccggatagggtgagagccccgtcgtgcccggaccctgtcgcaccaagaggcgctgtctacgagtcgggttgtttgggaatgcagccctaatcgggcggtaaattccgtccaaggctaaatacgggcgagagaccgatagcgaacaagtaccgcgagggaaagatgaaaaggactttgaaaagagagtcaaagagtgcttgaaattgtcgggagggaagcggatgggggccggcgatgcgccccggtcggatgtggaacggcgagagccggtccgccgatcggctcggggcgtggaccgacgcgggtcgtggcggcggcccaagcccgggcctttgatacgcccgtggagacgtcgtcgcctcgatcgtgggattcagcacgc

SEQ ID NO: 49902 - DNA, 243 bp, Gossypium hirsutum
  Clone ID: LIB3197-012-P1-M1-F7
gctaattttacaagaaacatggagtgatgcgtctggtgcattagtagttggggcacctgttgacatatcatcaatgagtgtggtgatgaatggtggggattcagcatatgtggcactcttgccatccggatttgcaattctttctggtatttcaccaagttatcacggtgggcgaagcgagtgcaatggagcactggtgaaacctgaaattgatgtgaagcatagttaggggatgtctacttt

SEQ ID NO: 49903 - DNA, 395 bp, Gossypium hirsutum
  Clone ID: LIB3197-012-P1-M1-F8
aaattgttatctctgaaggtgtcttaataaacgccttcgatttaccttcgagtggcatttacttctctattgctacgtttttgaatttttagtgagcgaaaatgagagagtgcatttcagtccacatcggtcaggctggtattcaagtcggaaatgcctgctgggaactttactgccttgaacatggaatccagcctgatggccagatgccaagtgacaagactgtcggaggaggtgatgatgcttttaacacctttttcagtgaaactggtgctggaaagcacgtccctcgtgctgtctttgtggatcttgagcctactgttattgatgaagtgaggactggtacttaccgtcagcttttccaccctgagcaactcatcagcggcaaggaagac

SEQ ID NO: 49904 - DNA, 407 bp, Gossypium hirsutum
  Clone ID: LIB3197-012-P1-M1-F9
atatttcctcgcttccgcctaggttttccttcgcagaactctctctctaagcttcttttctgcttctcgagtctcgaccttccgaaacacggctctgcatcgtcggcggcgtagcagaaaggaagagaaagaagaagctatgatggccgcacctgaagctcctctccgctatgttggcatccctcgccaatctgctgcttttcgcctcatgaagcaaatgggatgggaagaaggagaagggcttgggaaagataaacaagggatcaaaagttacgttagaattaaaaacaaacaggacacaattggggttggattggaaaagccgaatccgtgggctttcgatacagctcagtttgatagtattctcaagagattgaaagtgcaagcagcacaaatcaatgatgaag

SEQ ID NO: 49905 - DNA, 412 bp, Gossypium hirsutum
  Clone ID: LIB3197-012-P1-M1-G1
agcaaaacgaaccaagatggaaggcttagtcgtaaagctcccttcttttccatttctaagccctaatatttcatcatcatcttcttcttcgacttttcggctaggtttccgccgcttatccgcttcgatttcagccgccgttaaagaaggttccgtctcattaggccaattaacccgacccgacttccccatactccatcaggaagtaaacgggtcgaagcttgtttatttagataatgcggcaacctcccagaaaccaacggcagtgttaaaatctctgcagaattattatgaagcttacaattcaaatgttcatagaggaatccattacttgagtgccaaggcaactgatgaatatgagttggcacggaagaaagtggcagcttttattaatgcatcagattctgctgag

SEQ ID NO: 49906 - DNA, 415 bp, Gossypium hirsutum
  Clone ID: LIB3197-012-P1-M1-G10
cggacgcgtgggaaaaaaattagtgaattttgagtggattgttcttggatccaattttttggagattacagagaaaaaaagattgatttgcaaatacacaatacgaataatcgcgatgggtttcaagatatttgtggtggcgatgatggtgggttccatcgcagcggctcagatttcattagcatccaccgtgcctgcttttctatgggctcctggtttctctagcgttgaatcgaaggaatctgtaaattatcagatcaagtctccaaaggatctagctaactctgttctctctcaagggggatggtctgacttactgtgctccgagaggaaaaatgagcgccctgttgatctcgccgttgtttttgttggtagagagttgcactcttcagatgttgcagggaacaaacatgca

SEQ ID NO: 49907 - DNA, 209 bp, Gossypium hirsutum
  Clone ID: LIB3197-012-P1-M1-G11
tctttttacacctggaaaaaaaaccaaccactggtgaatttatttaagttggatggggttatttaaacattacatacaataaaagatttatttgcaaatacacaatactaataatcccgatgattttcaagacatcctccctaacaataatattcatttccatctcaccagctcatatttaattatcatccacctttcctattttttta

SEQ ID NO: 49908 - DNA, 418 bp, Gossypium hirsutum
  Clone ID: LIB3197-012-P1-M1-G12
tctttttcaatttgttttcgtttgttttatgggtggcaacagaaatgaaaattgggagggaagaaatttgttatttatgttcattttaatctttgtctgattatttccttttttaaacatgaaaccaaacatcatggcaaagcaaatttaaccaaaaattcccctccaaaacaatttcttttacctcattatgcaagtcttttaacattacaacatacaaatcccacacatttaatctaactgccattgtcaggctcatttaccgtaccagcaatacaaggccactagtagctgcaatcacctgactgagttacaacatagagccaatacagcattcccgtcccaacaaagtgaagaaaaaacttaatacaggccgggttgtgcccgggcttggcatgtatatttctgggtgggttta

SEQ ID NO: 49909 - DNA, 407 bp, Gossypium hirsutum
  Clone ID: LIB3197-012-P1-M1-G2
ggcaaggtgtttgattcattgttgaaaagagatgaggggtgctgcttttgtagccattgctgctacaattggtaactttttgcagggatgggataatgctaccattgctggagcaattgtgtacattaagaatgacctcaatctaggaactagcgttgaaggtctagtggtggctatgtcactgataggagcaacagctattacaacatgctcaggggctatatcagattggcttggtcggcgtccaatgctgataatgtcttcaatgctttattttgtcagtggtttggtaatgttgtggtcacctaatgtctatattttgtgcctagccaggctattagatggatttggaattggtttagccgtgactcttgtcccagtctatatatctgagactgccccatctg

SEQ ID NO: 49910 - DNA, 414 bp, Gossypium hirsutum
  Clone ID: LIB3197-012-P1-M1-G3
gctttctgttctaaatgctattgcttttatatccaagattcaacctttcaaaagtagtgagcttaaaagaaaacaagatttggtaaaagctagaaactgaaaggcaatggagggtagattggcgaattcttggcgattgacagtgaacgacaagaatttcatcaaaactgcgttgctttctgaaattcgaatcgatggtcgaaagccctttgaattccgtaagatttcaatcaagtttggcagagaggatgggtcatcagaggtgcagctaggccagactcgtgttatgggaatggttactgctcaattggttcagccttatagagaccggcctaaggaagggattctttcaatcttcacagaattttctccaatggctgatccttcattcgagccaggccgtccaggagaatt

SEQ ID NO: 49911 - DNA, 416 bp, Gossypium hirsutum
  Clone ID: LIB3197-012-P1-M1-G4
atatccttcatatgtagatatattttccattttctcttcatatttagcgatcaaaatttatttacttttccaaatccaatcatttacaccacattagcaaacttatggttaaaatttcaaaccctactttgcatcccttcttaagaaaataaaaaagcaaaatattttaattttgtttttaagtacataaaccattacaattgtgttatagtttagctacgtaatataacataattaaataattgctttcccttttaaagaacttgattcaaaaggatcaaattaggattttttttctattttttttaaaaatttctattgctattgttgttaatttggagaaatggagaagaaaaaggtggctttaccgttagtgtgccatgggcattcaaggccggtagttgatttgttctaca

SEQ ID NO: 49912 - DNA, 412 bp, Gossypium hirsutum
  Clone ID: LIB3197-012-P1-M1-G5
ttctgattggtgagatagggggcactgcagaagaagatgccgctgcactgataaaggaaagtgggactgaaaagcctattgttgctttcattgctggactcactgctcctccaggacggcgtatgggtcatgctggagctatagtatcagggggcaagggcacggcacaggacaaaataaagactctaagagaagctggagtgacagttgttgaatcacctgcaaagattggtgttgcaatgcatgaggttttcaagcaaagaggtctccttaattagtgtgtgtgtgattttccctagaaaaagaaaagcaaaacaatatttcctggattagtttcaggtgacaaacttgttcgaaatgctttcattgtttttgtgaaaaatcaattttatactgaaatgagggaaaaacc

SEQ ID NO: 49913 - DNA, 420 bp, Gossypium hirsutum
  Clone ID: LIB3197-012-P1-M1-G6
cctaagaagaccatcatttgccagcacggtgaagatgaatgttacctcaacactatacatgcctgcgccatcagcatctggcctgatccgagaaagcatttcaactttatctactgtattgaaaatcaaggccttcccatcaaggataatcagcactctgacggtatggaagcagtgtggaaagcctgctctgccagatccggtatggatcagaaactcatcaaggactgctatgacagtggatatggaagaaagcttttactgcagtatgctactgaaactgatcatctctatccaaaacatttatatgtcccctgggtgacagtgaacaatcaacctctctatgataagtatgaagattttataacctatgtctgcaatgcttacaaagacaaagatttggtaagggcctgcctgtcc

SEQ ID NO: 49914 - DNA, 412 bp, Gossypium hirsutum
  Clone ID: LIB3197-012-P1-M1-G7
aatataatactgcagtgtttcagccaatgactgcttttccacagtcatcaaggtcagtaaacccatttgatcttggtggcgaaggacctcctgttcaaactcaaacattcccttcaatggcatccttacagggtgctctaccaattatgccacgtcctggtctagtgcacacttctaacctcagtcctccatcgtcagcatggatgccacctcagtctttaccctatgcatcacggccaccttacccaggagcacaattacctagcaacttgccaccttccagccatcaaaatgggggcattggcaatgaggcatcgtttggttttgtaaataccgatcaacagatgggtggtagattctcagcagcacctaccccacagcctttcccttctgttggttggggcaacccgtt

SEQ ID NO: 49915 - DNA, 410 bp, Gossypium hirsutum
  Clone ID: LIB3197-012-P1-M1-G8
ggcctcttctcggttgagaggaaaagatgcaggatgtctaccatcatgctgggggggaccggatattacgacccggtggacgagtatacatccgcgattctcttgatgttatggatgaacttcaagatatcgcaaaagccatgggttggcatcctactctacgcgatacgtccgagggtcctcatgcaagttacaggatcttggtatgtgacaagcgcctactccgcagttgaaccaatagaactaaagactcgaaggccgaaacctcaccccttccgcaaattgaagacagctaaagcaagtcttgcaaatgattgtttccaaataaaatacaagtcgtcaattacaggtgtcttaatatcatgcagtcgtcagaccggatgaggatggaggaggacatgagacacatt

SEQ ID NO: 49916 - DNA, 408 bp, Gossypium hirsutum
  Clone ID: LIB3197-012-P1-M1-G9
gctcaaccaataacaatattaaaggccattccgtatttcgcaccataataattccaaaacaaacaaaaaagacacccaaaaattctacttttgcgagagagaaatagcgacgctctggattccacctcctcccgtccttggcgacggtgtttatgccgcttctttttcagcttgtacctgacttggatttagagggatttagtttccttttcaagacatggaacaagtgtgcttctggtcaaattgctaccttttccgagtgtttttcttccaagaagtactcgattggcggttccttgcccgtggagattttcttttggtttcctttgtcaattgcacttagttctcagtctccttttaacactcaacacaggagctggaatgctagttttttctgagataggtgtt

SEQ ID NO: 49917 - DNA, 410 bp, Gossypium hirsutum
  Clone ID: LIB3197-012-P1-M1-H1
aaaaaagataagtgaaagatgtcaactgcttcttcattgtgttcatcaactcagattaatggctttggagggggacttggggttctaagaacccatgtttctcaacccaagacactttctttcacaagaaggagaatttctacggtagtgaaggcaacatctcgagttgataaattctcaaaaagcgatatcattgtttctccatctattctctctgctaatttcgcaaagttgggggagcaggtgaaagcagtagaagttgcaggctgtgattggatccatgttgatgtaatggatggccgatttgttccaaacattacaattgggcctcttgtggttgatgccttacgacctgtgacggatcttccgctggatgtgcatttgatgattgtggaacctgagcaacgagt

SEQ ID NO: 49918 - DNA, 403 bp, Gossypium hirsutum
  Clone ID: LIB3197-012-P1-M1-H10
cggacgcgtgggctcagcagtggataaatatttaaattattgaacaacaatggattaatttacacaaacatccatgaaaagtaatgaaaaaatgaggtaagtaggaatttttccacatgttccccggttctgtcgtgttcgaattttcttagagctgaaaatcatgtacaacacaagacaatttttgtagcgagtatgcagggcataatatgtgcctaaagatctatttttccagcggtttcctcatcctccgaggcagcatattcatcttcacttagttttttgtcacttgacttcacttcttctgctcctacaacatcttcaggcttgacatatttccccacgcgtccgaaatacgtgtcctttttcctaccttgctcctttacatacgccttgtttgttt

SEQ ID NO: 49919 - DNA, 385 bp, Gossypium hirsutum
  Clone ID: LIB3197-012-P1-M1-H11
gaagacggcgtgtatggcacaacctgccctattccaccaggaaagaacttggcatacatgcttcaggtgaaggatcaaatagggagtttctattactacccatcacttggattccacaaggcagctggtggttatggagggatcaggatccttagtcgcccacgaatcccaggccccttgcctgacccagccggggattacactgtgctcattggcgattggtacaagtccaatcacacggttttgcaagctcatctggatggtggtaagaagcttcctttccctgatggagtccttatcaatggtcgtggacctggtggtgcctccttcaatgttgaacaaggcaaaacctacaggcttaggatatcaaatgttggactgcaaa

SEQ ID NO: 49920 - DNA, 413 bp, Gossypium hirsutum
  Clone ID: LIB3197-012-P1-M1-H2
cccacgcgtccgcaaagcagaaaaacttttgatttgagttaaaatcttcagatctgtgaaagatgacgaattggtcttgtctcagaggccatagggatatcgttacgacaccaacacctggagcgccaaatggggctgatggacaacgatcggccgatcattatcaggtgaattcctcgagctcaatgatgaccggaggaaagaaaagaaatcagaaagataaaggaaaaggaagaggcatcaagaagcagtgcctggcccgggtaaccggtgaagaagagagtgtgggagagcttactgtacagcatagtgggaaaatctacactgaccaaatcaacagaaggatatgtaaagtgaaggaaaaacttttggattggctaaggaactgtccagaagttatatccatcatcaat

SEQ ID NO: 49921 - DNA, 408 bp, Gossypium hirsutum
  Clone ID: LIB3197-012-P1-M1-H3
gtggtgtcctccctggcatcaaggtcgacaagggtaccgttgagcttaacggagccaatggctaaactttcacccagggtctagatggccttgcacagcgatgccagaagtactatgaagctggtgcccgctttgctaaatggcgtgctgtccttaagattagtgctaatgagccaaccgagcttgcaatccaagaaaatgccaacgggctagctatgtatgctgccatctgccagcaatgtggccttgtccccattgttgagcctgaaattcttgttgacggatcacatgacattaaaaagtgtgctgcggtgacagagcgtgttcttgctgcttgctacaaggctttgaatgatcaccatgtcatgctagaaggtactcttttgaagcctaacatggtgacccctg

SEQ ID NO: 49922 - DNA, 382 bp, Gossypium hirsutum
  Clone ID: LIB3197-012-P1-M1-H4
gaaaacaaagccatttttagtggtttcgctctctgtccctctctctaaagaagaggcggtcccttcgtcggagtgcgcttctgctgagtgtttctttcgttttcttttgtttaaagttttggagtaaagagtgtttcaagctttttagtcatattggctgcttaacgacccaaggtagcctcgccggatataggtgctcatcataaaaaatgactgtcacgccaggaatttccatcaacgatgggaaccttgtggttcatgggaagaccatcctcactggaattcctgataacatagttttgaccccaggatccggtgtcgggcttgttgctggtgcttttataggtgctactgcttcggattgcaaaagccttcatgtctt

SEQ ID NO: 49923 - DNA, 419 bp, Gossypium hirsutum
  Clone ID: LIB3197-012-P1-M1-H5
gaacattctaggcaccggaggttttggcaatgtctacaagggaaagttaggagatgatactcttgtggcagtgaagcggctaaaagacttgacgggaagttttggggaatcacaattcaggactgagttggagatgatcagcttggcagttcaccgcaatctgcttcgtttaattggatattgtgctacttctaatgagagacttcttgtttacccttacatgtctaatggcagtgtggcatccaggctcagaggaaaaccagctctagactggaatacgaggaagaggattgcaattggagctgcgaggggacttctttatttacatgagcaatgtgatccaaaaataatccacagagatgtgaaggcagctaatgttcttctggatgattattgtgaagccatcgttggtgactttg

SEQ ID NO: 49924 - DNA, 390 bp, Gossypium hirsutum
  Clone ID: LIB3197-012-P1-M1-H6
gagcattggagcccatgcacagatggattctctgcagcagcaaataagatcacgtgagaaacagcttttaccagtatacacccagatagccactaaattcgccgagcttcatgatacttctctgaggatggcagcgaaaggggtaataaaagaagtggttgactgggatcgctcacgatctttcttctatagaagattgcgccggagaattgctgagagttctctggtcaaaattgtaaaagatgctgctggtgatcaactgtcgcataaatctgcaatggacttgatcaagaaatggttcttggattccagtgttgcaaaaggaagagaagatgtttgggttaatgatgaagctttcttttcatggaaggatgatctgggaaattatag

SEQ ID NO: 49925 - DNA, 411 bp, Gossypium hirsutum
  Clone ID: LIB3197-012-P1-M1-H9
acctttctcaactctccatcatggaatggtcatccagtttatagtagtaacagggtcgtacaaggcatcaccattattgctcctatcacatctccaaacacagatggtatcaatccagattcttgcacgaatgttagaattgaggacagttacatagtttcgggagatgactgtatcgcagtgaagagcggttgggatgaatatgggatctcatttgggatgcccaccaaacaattagtcattaggaggctgacatgcatttctccttatagcgcagccattgcgctggggagcgagatgtcgggcggaatcgaggacgtgagggccgaagacatcacggccatccatacggaatccggggtcaggatcaagactgctagaggaagagggggattcgtgaaagacatatac

SEQ ID NO: 49926 - DNA, 310 bp, Gossypium hirsutum
  unsure (1)..(310): unsure at all n locations; Clone ID: LIB3197-013-P1-M1-A1
atctcaaccttctctgcacagtgggtccagcatcctttgaagcatgagtgcttaccangagaagcagaccgtgaccccaccacctcagcttcaacagcagcaggtgaaacaacccagccagcctccacctcaggaaccatttgttcccataagcaaggagccatgccacccaaaggttccacaacctggaaacacaaagattccagagccagattgcaccaaggtccctaagccaggctacaccaagcaccctgagccaggcagcaccaaggtccctgacaaaggctgcaccaaggtccctgagccaggc

SEQ ID NO: 49927 - DNA, 168 bp, Gossypium hirsutum
  Clone ID: LIB3197-013-P1-M1-A10
acattcttttttctacatacacacaaaacaataatattcccccattaccaataatgaggaccatattttcatatccctctcctcttctctctctttatatctttctacatttttctcccttatttctctacctattactctttaaataaaattttaacaaaccttttt

SEQ ID NO: 49928 - DNA, 400 bp, Gossypium hirsutum
  Clone ID: LIB3197-013-P1-M1-A11
ctcaatttccagtatccaaatcagaagaagagaggaagaagaagaagccagagggagaagaaattatgtcttcgcttgcagctgctagagcagataacttttactatcctccagaatgggatccaagtcagggctccttgaacaagtttcatggacaacatgctttgagagagagggcgaggaaaatagatcaaggcattttgattataaggttcgaaatgcctttcaatatatggtgtggggggtgcaattctatgatagcaaaaggtgtacggttcaatgctgagaaaaagcaagtgggaaattattattctacaaaggtatcttctttttactaatagcataatctactcagtaaggttcattttaatctgtcttgggcaagtgttttcctatgatc

SEQ ID NO: 49929 - DNA, 433 bp, Gossypium hirsutum
  Clone ID: LIB3197-013-P1-M1-A12
gtcaactgaaccaacatctattgagggtagtgttacacctcctacttcgatagattctgaaaattcgggagttggagcttcaatccaaacaaaggggactaccgggaaaagaaaagccactcctcaaaggtcagaagtttggtctcatttcactaagattattaatagtgagggtgcaagtaaggctaaatgtaattattgtcaaaaggatttttgttgtgatatgaaaaaaaaatggtacagggttattgaaatatcatattagttcatgtaagaaaaatcctagtaatattgttgacactagtcaaggacaactagttttacctagaaagggagttgaaggggggaaggaaatctttcaacttggagatttgatcaagaagcatgtgtggaaaggattagcacaaatgattgtgattgatgaattaccttt

SEQ ID NO: 49930 - DNA, 391 bp, Gossypium hirsutum
  unsure (1)..(391): unsure at all n locations; Clone ID: LIB3197-013-P1-M1-A2
atcaccattgttcaggagaccttttaaccactacatgactgccanaagctcgtgagaccacggagtcaacactgcggcttacttaatccgatactgttagattatcatgctgtttgatattctaataagacaatgagaaactgtggagctctaccaaaaatgcctcgcacattcaattatacagcttaccataagtacctttactggttgatgtgccttgattatttgctcagctcaataactcaactcttatcataatgaacgaccccattctttaacctagaactactacatatctgccaccagtactcttataatatccaatgttaccacctggacgcatcattgtacgatggtgtaaagtggatgacgactttacagcccaacatta

SEQ ID NO: 49931 - DNA, 349 bp, Gossypium hirsutum
  unsure (1)..(349): unsure at all n locations; Clone ID: LIB3197-013-P1-M1-A3
gacaaaaggctggaagagtctaccgtagcggactaaatacttttcccaggacatggggattattccgatattattaccgtatattcataaatatacgggtaatcttgccttttgaggccaaagctttgtggttgaacataagcgagcaactcggaggtatgaattagtttgttttcgtttttggtgcaacagaataaaagaaactacgttaagggatgtcaatgttgtgagatggtggtgattgtttttgttttttggcaaagagaaaaatgatgtgctcatgtgtcatgctcanggacattaaagaaggggaaaatattatattggtgatcttacatggtattttggt

SEQ ID NO: 49932 - DNA, 417 bp, Gossypium hirsutum
  unsure (1)..(417): unsure at all n locations; Clone ID: LIB3197-013-P1-M1-A4
ctgttttcttttcctttttttcacaaattatgttctaatgcaaattcaaatggagaatggaatanggaaaaatggacatgtataagaaatcttctataaataccaccttctccttcgtttcatttccagactttacctacacattttacaaggcacaggatttctgggatttttctgcaaattggaagaaagataaagatggcaagaacaagaattaccatcttttttatggggctcgtgctttggtgttgcttgacaaaagcggaatacatgaaatataaagatccgaaacatgcggtacatgttcgaacccgggacctgttggatcgaatgacattggaggaaaagatcggacaaatggtccatatcgaacgcagcgttgcttcngccgacgtgatgaacaagtatttcattggg

SEQ ID NO: 49933 - DNA, 397 bp, Gossypium hirsutum
  Clone ID: LIB3197-013-P1-M1-A8
attaaacaaaaaccaactaaaaagatggcgaggagaccggacgaggaatacgagtacttgtttaaggtagtgctaatcggcgattctggtgttggaaaatctaatttgctttctcgatttactcggaacgagttttgcttagaatctaaatctaccatcggcgtcgaattcgccacccgcactctccaagttgaagggaggactgtgaaagctcagatatgggacactgctggtcaggaacggtacagagcaataaccagtgcttactatagaggtgctcttggagctcttctggtgtacgatgttaccaagccaacgacttttgaaaatgtgagccgatggctgaaagaactcagggaccatgcagattctaacattgtaattatgatgattggga

SEQ ID NO: 49934 - DNA, 417 bp, Gossypium hirsutum
  Clone ID: LIB3197-013-P1-M1-A9
gatttttacagagagagagggggaagaatggtcaaacattaccggtggcgcggggcaatggttgatattccccccctctctctctctttaaagctctcttcatctctctcccttatttctctctctttttgtctttgaatttgtgttgaaaggttcttttggtcgtagaacttttttgggtttttgtttgtaattcgtttgattaccaaaagaaactgatttttttttcttttttgagttattttgtggatttctgggttttctttctcaagtttgctcgagagataaatggcacaacgttctcgtgtacccaagtttggcaattgggagagtgaatgtaatgttccttacacagcttatttcgataatgcacgtcatggtcgcaatggaggaaagattgtgaacccaaacgatccc

SEQ ID NO: 49935 - DNA, 443 bp, Gossypium hirsutum
  Clone ID: LIB3197-013-P1-M1-B11
ctttttcttgtttgttttatcaagctcctcttatttgtgctaatggagttcggaatacccttattccatatattcatcagctttcttcttgttttgttaattgcaattcgaagcgtgaggaaatctaaagctaggagtttaactcaaaggttgattccagggccacggaaattacctttgatcggaaatctgcaccagctcgctgattctactctaccccatcgcaccctgcgtgacttggctacgaaatatggcgccgtcatgcacctgcaactcagtcaagtttcaactgtggtcatttcttctgcagaaatggctgaagagattatgaaaacacatgatattgtctttgcttctaggcctttacttcttgcggccaagattataacttatgaatgcactgatattgtcttttcaccatatggaaagtattggagaaatct

SEQ ID NO: 49936 - DNA, 389 bp, Gossypium hirsutum
  unsure (1)..(389): unsure at all n locations; Clone ID: LIB3197-013-P1-M1-B12
aattaattaatacttaaaaataattaatttaatagtttgaaatttataaaatggcttctcaggataaaaaaatattttttgaaaaaaaaaagaaacagaaattagattagtttggggctaagtaagtgttgtcatctgcatttactgtaaaattcagatctgaagctgaaccgagtgggtccaccattatctcaacgggtatgatttcggacaaacttttttagttgtttgtttgttgccaaagttgtaatgaagcatatactttcgtacttagaagagccatttgaattcatttcaaaaaattttgaatttttttggttaaagtaacagcaaagtttctgtggtatggcagattgtattctggtatttttattagtagnctttatact

SEQ ID NO: 49937 - DNA, 371 bp, Gossypium hirsutum
  Clone ID: LIB3197-013-P1-M1-B2
tgttgtgaaaaagtatgacatactttttatcggtgatgaggttatttgtgcaggtggaaggcttgggacgatgtttggatgtgacaagtacaatattaaaccagatcttgtttcactagcaaaggctctttcttcagcatatatgcccattggagcagtcatggtgagccctgaagtttcagaagtcatttattctcaaagcaacaaacttggtagtttctctcatggattcacctactctgggcaccctgtatcctgtgctgttgcaattgaagcactcaagctctacaaggagagaaatattgttgagaaagtgaagaccatttctccgaggtttcaagatggtctaaaatccttttctgacagtccta

SEQ ID NO: 49938 - DNA, 408 bp, Gossypium hirsutum
  Clone ID: LIB3197-013-P1-M1-B3
cttggctccatgttatcttcctttttgtgagagggtattgtaaagatgcgcgtgggtttcaatgagtttggtggggggattttatagagcttattctcttctcttgaaagaaactcaagctggagattgaggcttaattgtcatggatcctgagtttgggaagtccttggatacttcaaagaagaattcttggaggacctcattgcttttagcgtaccaaagtcttggtgtagtttatggggacctgagtacttctcctctttatgtctacaaaagtacatttgctgaagacattcaacattcggagacaaatgaagagatttttggtgttctatcctttgtcttctggacccttactttagtccccttattcaagtatgtgtttgtggttcttcgagcagatgacaa

SEQ ID NO: 49939 - DNA, 446 bp, Gossypium hirsutum
  unsure (1)..(446): unsure at all n locations; Clone ID: LIB3197-013-P1-M1-B5
cccacgcgtccgcggacgcgtgggtgctagggtgactccttgggcaatatgggcgaagggcttggactgctgaagaaaacaggcatggtgatctacttaataagtatctctacttgtccggaagggtcgacatgaggcaaattgagaagacaatccagtatttgattggatcaggaatggatccacgtactgagaataatccttatctgggattcatctacacatcattccaagaaagggcaactttcatctcccatgggaatacagcccggctcgcaaaggagcatggtgacatcaagttggctcagatatgtggtaacattgcctctgatgaaaagcgccacgagactgcatatactaaaatcgttgaaaaagctctttgagattgatcccgaccgaacagtcctggcttttgctgacatgatgaggaagaaaatctncatgcc

SEQ ID NO: 49940 - DNA, 337 bp, Gossypium hirsutum
  unsure (1)..(337): unsure at all n locations; Clone ID: LIB3197-013-P1-M1-C11
tcgtttactcgtgggcggacgcatgggaagaagggtcttatatgtttggactgcaggatggttnctccacgggaactggagagggcaaataggactcttttaatgagacacgaatcagaaataaagtgaaatgcatattggctaggattgttggctcacctacaatcttcttctgttcctagaaaggacatatcatgcgtcaaagagcttacttctctatatgaggccggttctattgaggacatctaccttgcttacgaccagctttatgtggacgaagattttttttactcatgttttggaattgcaggtgttaatgccgtgtatagtgctatgg

SEQ ID NO: 49941 - DNA, 439 bp, Gossypium hirsutum
  Clone ID: LIB3197-013-P1-M1-C2
aaattttgtaggcgaaaaatcaatgatcaagaagcgttacatgtatctaacaggggagattttgaaagagaaccccaatgtatgtgaatacatggcaccatcactagatgcaagacaagatatggtggtagttgaggtaccaaggctaggcaaagaagccgccaccaaggctattaaggaatggggtcagcccaaatccaagatcacccacctcgtgttttgcaccaccagtggtgtcgacatgcccggtgccgattaccagctcactaagcttttgggccttcgcccgtcggttaagcgcctcatgatgtatcaacaaggttgtttcgctggtggtactgtgctccgtgtggccaatgacttggccgagaacaacaagggcgctcgcgtgcttgttgtttgctcggaaatcaccgcggttactttccgtgggccgagt

SEQ ID NO: 49942 - DNA, 436 bp, Gossypium hirsutum
  Clone ID: LIB3197-013-P1-M1-C3
ttctttatacacgcccccatttattttattggggggacaaattttccctgcagtgggggtataatttcctacgaaaagaaatatgagagagtgcatttcagttcacatcggtcaggccggtattcaggtcggaaatgcttgctggtaactttactgtctcgagcatagcattcatcctgatggccaaatgccaagtgataaaactgttggtggaggagacgatgctttcaacacctttttcagcgaaactggtgccggaaagcacttacctcgcgccatctttgttgatctggagcctactgttatcgattaactgaggactggtacgtaccgtcagttattccaccctgagcaactcatcagtggcaaacaagatgctgccaacaatttcgctcgtggccattatacaattggcatatagattgctgatctctgc

SEQ ID NO: 49943 - DNA, 358 bp, Gossypium hirsutum
  Clone ID: LIB3197-013-P1-M1-C6
ttttatttaaaattatttcgacttcgaatcgtggatccaattttttgattgcctccgcaactcttcttttcttcccctaaaatcgaaatcccatgaaatccttccatctttttctcactgctgatgccaagccattcattgcattgaagaattttgattgtattttaagaacacctttcccttttccctcttccctcgtccaccgtcaactatggcttccttaacctctctcaaaagatcctcaccctccatcctccatctttcctccatccattatcgcctccaaatccgccaattctcgtctctgccgctcatcatctcttcatacatccagtctaataacttaattgattccatt

SEQ ID NO: 49944 - DNA, 457 bp, Gossypium hirsutum
  Clone ID: LIB3197-013-P1-M1-C8
aagcggtccgccgctctaccgtcctaattcccgtcacccaccgtctttttattacccacaaatcttttgtggattattatgggtgcaccgaatcatcttttttgattattccttaaaggacatatctacttattattttcctctatgtttatgataaatctaccatcgttattttattatatatctatatcttctaattcctttctcttattctctccacgtttatttctccaaacattctccttctttctttccttctcatcaatccttcctctagaccttttacaaatattttcttatcttcgccttataaaagttcattaccttcttgtttattctattttctatttctttcactttttatctttcactccagtttattacacttattttttttcctcttctatttctttcttaataattttcttccttattttttttcttccaaaattttttt

SEQ ID NO: 49945 - DNA, 283 bp, Gossypium hirsutum
  Clone ID: LIB3197-013-P1-M1-D1
ccgtttaagggcctataaaccctctggtgctctttatccttatggtttttaaatttctatcaaatgaagagtgcattcgatccacatcgtcagccgttccaggtcgataccttgctggacttctgctcagctgaatcacctgtggtcaatccagtgacaactgtcgagagtgtatctttaacaccttttcaggactgtgctgggaagcacgtcctggcctcttctggatctgacccactgtattgatgaatggaacgggctaccgcagctcttcacccaaaca

SEQ ID NO: 49946 - DNA, 446 bp, Gossypium hirsutum
  Clone ID: LIB3197-013-P1-M1-D3
tctcttttttcgctcaaagaatgaaaaggtatgggtgattgttcaagacgaggggaggggggagaccagtggtggtatcattagatccagatttcaactatttcgtgctgcaacaagaggacaaacttgtcgaactatattacatggattccctggccaagttggttcaccaagactacatgaaaaacataggtggcgacttccacaagtatttcaagcgcgtcatcctcattcacttcggacatgagcctctgaaacacaagctcttgtctcattttgaggatgtcataaaccattaatttgcaggactggagcatgctgcctcatgttgatcttaaacaccaaactgcttctattgtatttaacacggcctaaaatattctgattatcctgtgtaccaaaatataatttatgtcatgatttgagcgacatcttgcaaggactta

SEQ ID NO: 49947 - DNA, 451 bp, Gossypium hirsutum
  Clone ID: LIB3197-013-P1-M1-D4
agcaatgcgaacccttatccgtctggggacacttcgaatccctcggaagagaaatgatgatgaagatgcaaaggaggagctttactctctggtaacggttgccgaaatcccagccgaaggactcaaaggtttgggcactaaggtcatcgatgacgatgatgagtaatctccgatctctagtttaagaaaagcattgcattttctttactgaaaagtttaaatccaggttttggctagttttacgattttgttcatcaactgtttttcctttggtattcggtttatcgttgtttagacttttaagctcggtgcaatttatgtttcaatggcggaatcaggttctttttgcaattgagtttcccatacattatgaagcattactttattatattcatgtcatgaataagccgattatgcacgaacttgctgagttttatcaatgacttggaca

SEQ ID NO: 49948 - DNA, 287 bp, Gossypium hirsutum
  Clone ID: LIB3197-013-P1-M1-D5
ctaacccttatccatctgaaaacactgggtatccttcggaagagaaatgaggattaatattcaaatgaggatctttactctctagatacttttgccgaaattctatccaaaagactcatatggttgggcactaatgtcatatattactatgatgagttatctccaaactctattttaagaaaagcattgcatttattttattgaaaagtttaaatccaagatttatttatttttactatttttttcataaaatgttttttcttaaaaatttatgttaatacttgttt

SEQ ID NO: 49949 - DNA, 305 bp, Gossypium hirsutum
  unsure (1)..(305): unsure at all n locations; Clone ID: LIB3197-013-P1-M1-D9
gatgagagaagagggtgaagattgagtacctannaataagtaatagtttagagtaggagagagcttgcatttttagctatcccaaatagatttagtttccttttattcgtgtagtttttgcttattctattgtagtgaacttcgacttcttctaagcntttgttcaatgactatatnggactgcaatagatttgacgagtagttcggcttaagttctagtgttccattgctgaaaagaaaaaaaaaattattatattaaaaatatttttttaaaaaaatatttaataaaaaaaaaatttatatta

SEQ ID NO: 49950 - DNA, 401 bp, Gossypium hirsutum
  unsure (1)..(401): unsure at all n locations; Clone ID: LIB3197-013-P1-M1-E1
tttcgtccggttttttttctccttctaaagctaaaagaaagtgtgttcctttccatgtgaagggaataagccaaaagctaancataagaagggtttatggtctcctgaagaagattttaagctctaaatctatgtccttaaacatgaccatttttattgtagctctgttcccatcaatgcatggttgcagaggaatgggaagagttgcagattaaggtggattaattacttgagaccgttgctaaaacgatgcacttttacgccgcaagaggaggagacgattctcacccttccatcatttgttaggcaacaagtggtcacaaattgcacaaaatttgcctgggagaacagataatgagataaagaactattggcattcatatctgaaaaaaagaattgct

SEQ ID NO: 49951 - DNA, 440 bp, Gossypium hirsutum
  Clone ID: LIB3197-013-P1-M1-E2
ttttcatttcttgtttaacaccaccacctccgtgcgcaactcagcttgtacacgcgggctactcacttcaacaaattcttttgaattgtttcttacgaatcgagtttgattttcttggaagtcgaaaatacgatggggtcggagctgatttatagaggctctgagacccagccttcttcagattcatattcgcccaaacccgtaaaaccatgggcctccgtaacccgccccatccattacctcctccgtgaacaacgcctcctcttcgtcttcgtcggcattgcgatcgccaccctgattttcaccgtctttccaacttcacccgctccgtacgtcgctcctcatagccgcttcaccaccctgatccccgattccatcacctacttccccatcgagacccaacagaagttctcctccgcgcaccggcttcggttcgggtc

SEQ ID NO: 49952 - DNA, 432 bp, Gossypium hirsutum
  Clone ID: LIB3197-013-P1-M1-E3
gcatgtctcactgactgtctgggttttgctggtgtgatggtataattttgaggtggaattattggttttgtatgaaatattatacatattcagtgagatttattggtgaattgacaattgtgttcccccaatttcttagttttgaactgctcttgtagcagcagacctcttcactctctctttcaaaattcagcaaattaatgtgagcaattaacaacaattaatactatttttgtcgatggttgattattttaattgatataataacaaatttagcccttgatgtttacatatgttgttaattcagtcttgattttaaaaaatttaacaactttactctcaacatttacgtatttacaaaaatattatgcaataagtttgttaatatcatgaccacattgataggatgtgtaaattatggaagctaaaatt

SEQ ID NO: 49953 - DNA, 537 bp, Gossypium hirsutum
  unsure (1)..(537): unsure at all n locations; Clone ID: LIB3197-013-P1-M1-E9
ccccccctccctttttccacctttttttttccccccccncccncccccaagaggcctctttaataagaggatagttgccccccccccctctctcctaccctttcttttctcctccttcctttttctcctcttctttttcctcccctttttttcctcccactatttttttttcacttattttctctccctcaaaatacctttctcccctcttttttttctcccccatacttctttcccccttctttttttctccctcttactcttttcctcctcctttttctttctcccctccttctatcttcctcctccctttttctctctcctctctttctttctcccacttctcttttttttccccctttactttttctctccctctatatttctcccttcccccctctttctttctccaccattctttttccccacctccctttttttccccctcccctcatttctcttctcccctctcttttcttctctccaccctatttcttttcccccttctctttttttcccctccctcctctttttttc

SEQ ID NO: 49954 - DNA, 340 bp, Gossypium hirsutum
  unsure (1)..(340): unsure at all n locations; Clone ID: LIB3197-013-P1-M1-F1
tgaaaaaatatgggtttccaaaaaaccatatggggtttccttttctggatatgggcttaactaacaagccttttttttagccttcctagtgaatactccataggggaacatgaaattgacccatttctttcgaaggaaagggtgttggagatctttccacagtgggaaagaaaagcatcggaaaagtgtaccggcccccccgaggaggctgaaaaaaaggtttgaaaaatttcaagggggattntgaagtatatccctagagaggaaggcaaagagaaaagcaaacaaatgggaacatcatgtgggattgaacaagtttgctgatatgagccatgaggag

SEQ ID NO: 49955 - DNA, 88 bp, Gossypium hirsutum
  unsure (1)..(88): unsure at all n locations; Clone ID: LIB3197-013-P1-M1-F10
ggcggttacgcgaccggccacgcgaccacggggggggcnnnnaagggggggggggggcccgacaacaacaaggaggggagagaaggag

SEQ ID NO: 49956 - DNA, 358 bp, Gossypium hirsutum
  Clone ID: LIB3197-013-P1-M1-F12
tttcatcaaagggcaccttaaaacccagagaccccgtttactcaaccgttgatggcgactttcctattgcagatttttcccgagaaaaaaaccaatgcaaacagcgtatgacatccgtaatctcccaatcgacatcacattttctcgtcttggagaatggttggtagatcggaagagaataccgtctgattggagaaagagattggcggcgatacgatccaagatatcgaaggtgttctcggcgtttcctaaggatattgatccctaattttaaaaccctgaccccttgattgtattgggtacttatagggccaataaatattttttatatactttcttaaggttgacttccatttta

SEQ ID NO: 49957 - DNA, 433 bp, Gossypium hirsutum
  unsure (1)..(433): unsure at all n locations; Clone ID: LIB3197-013-P1-M1-F2
ctgaacttgaattctaattctttagatgggacggtaccaattgggcttggacgagaaatcccttgcacgactggatttgtccgataatcaattctctggctccataccggaaagtttaacatcttcaaatctgcagcttgtgaggcttaacaataacttattggaagggaaaagttccagaagaactttactctgttggtgtgcacggagggactattgatctttctggtaacaaagggcttgtgtggagttcctcctttaccggattgtccccttttttgggagaatggtcgcttgtcgaaaggtggtaaaattgcaataggcctatcatgcttcctttttgttgctgtgctgctgctggtgatctacatattctgtatcangcggngtagaaatgattatgattttggtttaccttcagatttaatatcac

SEQ ID NO: 49958 - DNA, 440 bp, Gossypium hirsutum
  Clone ID: LIB3197-013-P1-M1-F3
gtcgtcttgatacacgccctcatttattttggggttcaaacaaattgtccctggagttttcgtataatttcctaggaaaagaaaaatgagagagtgcatttcagttcacattggtcaggccggtattcaggtcggaaatgcttgctgggaactttactgtctcgagcatggcattcagcctgatggccaaatgccaagtgataagactgttggtggaggagacgatgctttcaacacctttttcagcgaaactggtgccgggaagcacgtccctcgcgccatctttgttgatctggagcctactgttatcgatgaaattgaggactggtacgtaccgccagttgttccaccctgagcaactcatcagtggcaaagaagatgctgccaacaatttcgctcgtggccattatacaattggcaaagagattgttgatctctgc

SEQ ID NO: 49959 - DNA, 334 bp, Gossypium hirsutum
  Clone ID: LIB3197-013-P1-M1-G1
ttcttagagtcctaataaccgaccaagaccgagctctgaaatctgtggtggcggaaatctttccaaatccacttcattgcttcttcctgtggcacgtattaggaaaggtttctgagaaccttggtcatgtaatcaaacagcatggaaacttgatggaaaagtttgagaaatgcatctacaggtcttggacagatgaagagttcggcaaaaggtggtggaaaattcttgatagatttgaactcaaggatgatgaatggattgaaatcgttgtatgaagaccgcaaaaagtgggtgccaacctatataatgaatgttttgttggctgagatgtcta

SEQ ID NO: 49960 - DNA, 242 bp, Gossypium hirsutum
  Clone ID: LIB3197-013-P1-M1-G10
aaaacgaaaaggaaaagaaaatgggagaaaatgagaggacgatgaacaacatcgagggcatgggagttgcagagcgttcaagagctaaccacaattacagtggtgaagacgaagacgacgacaatattaccagtttctcttttccttccgtcaaatccagtcctcgcaacgcttcttccaaatacgacttcgtcaaagtgagggtctggttgggtgataacgccgatcactattatgtttta

SEQ ID NO: 49961 - DNA, 385 bp, Gossypium hirsutum
  Clone ID: LIB3197-013-P1-M1-G2
cggtctcgtgggatttgaataaaccaaaggcgggactacagtggaaatattaggggttttgcaatgcatatattttgcttatataagattgttataaggtaaggtcaaaggtgcggctgaagagtgaggatccttaacctaaatcgaaggctgaaacgccaatgaaaactagaaagccaacaacatcagcagcaaggggatcctcttcttcttcacctccttcccaaactctttcctttattttccaatatgccccgaaaatcttctcttttcaaacacacccttattgctaccgtcttcttcctcctcgccatctatgccttcttctccactttcttccacactcctcttcccccctccgattccaactccgattcttcttctt

SEQ ID NO: 49962 - DNA, 438 bp, Gossypium hirsutum
  Clone ID: LIB3197-013-P1-M1-G3
cccattcgtccgcccacgcgtccggatcaaccaaccaaaaaagataaacaagatggtttcagggtcagggatctgcgccaagagagtggttgtggatgcaaggcatcacatgctaggaaggttggcttccattttggccaaagagttgttgaatggccaaaaagtagtggttgttcgatgcgaagagatttgtatgtcgggtggtttaatgaggcagaagatgaagtacatgaggttcttgaggaagcggatgaacactaagccttctcatggccccatccattttcgtgctcctgctaagatcctctggcgtaccattcgtggcatgattccccacaagaccaagcgtggggcagctgctcttgctcgattgaaggcttatgatgggattccagctccatatgataagacaaagaggatggttattcctgatgctct

SEQ ID NO: 49963 - DNA, 54 bp, Gossypium hirsutum
  Clone ID: LIB3197-013-P1-M1-G4
atgcttttattcttcctaccactcgtccggatcaacggggcatattatataaac

SEQ ID NO: 49964 - DNA, 378 bp, Gossypium hirsutum
  Clone ID: LIB3197-013-P1-M1-G6
gctttcttcttctcctctatcttttgcctatcagatcatgtaaagctcagtagaggtgtagctgagttttccctctaaaaattttgtaatacaagcccaaaagattccttttttctttgaaaaatggctttgagtaagttcttgggtctgtttcttatccacattgctctgctttcgagctcctgttttgctgcagatccgtttgtcttctatgattttgaggtctcttacatcactgcttctcctttgggtgttcctcaacaagttattgctataaataacaagtttcctggcccaactatcaattcaactactaacaacaacgtcgtcatcaatgttcgaaacaaattggacgaaaggttactcctacattggtct

SEQ ID NO: 49965 - DNA, 288 bp, Gossypium hirsutum
  Clone ID: LIB3197-013-P1-M1-G9
tgtggaaagagagcttctcatcacattttattgtgcttctctctcagatcttgagaaatgtatacatcaatgaagaagatccacaaagataaagatgttgaaccaacagaatttgaagaatcagttgcccaagcattctttgatttggaaaataccaaccaagatctgaaaagtgacctcaaggatctctacattaattcaacaatccaaattgatgtgtcttggaacccgaaagcttttgttattcatgtcccctaccgattgaagaaagcttttcgcaagggtcat

SEQ ID NO: 49966 - DNA, 286 bp, Gossypium hirsutum
  Clone ID: LIB3197-013-P1-M1-H10
ctatccaaggatgatactctagatggggatgtcttgatccttggggggcacattctccctatgaccgaagggtttacatgttggaactattcttgcctgatgaatatcccatggctgctcccatggttcctattcttacaatcatatatcatcctaacatctgtctgctttgtagaacatgcctcgttattctcaaggacaaatgtagtccagctctgcagatccgaactgttcttttaagcatcctgtcactcttgagcgctccatattttttttacccactctc

SEQ ID NO: 49967 - DNA, 433 bp, Gossypium hirsutum
  Clone ID: LIB3197-013-P1-M1-H2
cccacgcgtccgctctaagtgaagaaagatgcgatcttttgctgttgtgtgtttctgagactcgttaactgttacttacttcctaatgaaaggcttctggcgaccctttgctgcaagttaaaggctcttgtgcttcgctgaggcttgggggtgttaggagctattcagtgttaagcaatgatcaactgagaattaacggggttaaagatgtgattgctgttgcttctggtaaaggtggtgtaggcaagtctaccactgcagttaatttggcggttgccttagctaacaagtgcggattgaaggtgggcgtgcttgatgcatatgtgtatggaccatctgttccgaccatgatgaacatccaccaaaagccagaagttaataatgatatgaagatgattcctattgaaaactatggagtgaagtgtatgtcaat

SEQ ID NO: 49968 - DNA, 441 bp, Gossypium hirsutum
  Clone ID: LIB3197-013-P1-M1-H3
gtgatccttaacaacggcaccagaaccagaggacgagatcaatgacgagaaaaatggcgcgcctcttgatgaagacgatattgcgcttctcaaaacctatgggttacggccttattcaacgagcataaagaaagttgagaaggacattaaggaaatggcaaagaaagtaaatgactcatgcggcatcaaggagtcagacacgggattagctgcacccagccaatgggatcttgtctcagataagcaaatgatgcatgaggagcaaccgcttcaggtggcaagatgcacatagataattaatccaaatacagaagatgccaaatacgttatcaatgttaagcaaattgccaagtttgttgttggccttggggacaaagtctcaccaactgatttagaataatgcatgcgggtgggggttgattcgaacaaatatcagataca

SEQ ID NO: 49969 - DNA, 336 bp, Gossypium hirsutum
  Clone ID: LIB3197-013-P1-M1-H4
cttacacataaacaccataaagaacctcttcattgtgctcttcttcctttcatgaaactgtaagttaaataaaatcgaatcctcatggccctttcaatggcggtttcacggcttaggaacccaggtctctcaagagccctcccatctctgttgagagctcgttttctatcttgcttcgcctcacccacaccactttctcgcagttcaaatgtggaaaggcctttcaaggactgggatggatcttgcttaaaggccaatgctttgaccaccataattggagtatacggtaattcatcaaagttcaagttgcagattggacgtcgtcatttctcttat

SEQ ID NO: 49970 - DNA, 439 bp, Gossypium hirsutum
  unsure (1)..(439): unsure at all n locations; Clone ID: LIB3197-013-P1-M1-H9
cttttatatacataaaggatgctattgaagctgttctcttgatgattgaggaggcagatagggccaatggccatattttcaatgtgggtaacccgaacaatgaagtcacagttaggcaacttgctgaaatgatgactaaagtctatgccaaggttagtggagaaactgtgctggagtctccaacagttgatgtcagctccaaggaattttatggtgagggttatgatgatagtgacaagagaattccagacatgaccataataaacaaacaactcggttggaaccccaagacatccctttgggacttgctcgaatctaccctaacctaccaacacatgacttatgccgaggctattaagaaatctatagcaaaaccttctgcatcctaaaagaggctagatgnttaaaccacggctaataatagactcattaaatgtgc

SEQ ID NO: 49971 - DNA, 345 bp, Gossypium hirsutum
  unsure (1)..(345): unsure at all n locations; Clone ID: LIB3197-014-P1-M1-A11
cttaaccttgctggcctccccaccacaaccattggatccttccctcaaactttggagctcaggagagttcgtcgtgaatacaaggctaacaagatctcannnnnngattacgttaaagccattaaagaggaaattaagaaagttgtnnnccttcaagaagagcttgacattgatgtcctggttcatggagagcctgagagaaatgatatggttgagtactttggtgagcaattatctggttttgctnnnacgtgtaacggatgggttcaatcttatgggtctcgctgcgtcaagccaccaatcatctacggtgatgtttggccgcccaaaccaatgaccggtttc

SEQ ID NO: 49972 - DNA, 319 bp, Gossypium hirsutum
  unsure (1)..(319): unsure at all n locations; Clone ID: LIB3197-014-P1-M1-A12
caaccattggatgnnnccctcaaaccttggagctcaggagagttcgtcgtgaattcaaggctaacaagatctctgaggatgattacattaaagtcattnnngnntaaattaagaaggttgttgaccttcaggaagagcttgacatgnantgctgggttgatggagaggctgagagaaacgatatggttgagtactttggtgagcagttgtctggttttgcattcactgttaatggatgggtgcaannnnacgggtctgcgatgtgcaagccaccaatcatctacggggatgttagccgccccaagccaatgactgtttt

SEQ ID NO: 49973 - DNA, 253 bp, Gossypium hirsutum
  unsure (1)..(253): unsure at all n locations; Clone ID: LIB3197-014-P1-M1-A2
cttgnttggggaggtgaggggggggcanctcacgtggcacatataactgcctgggctaagctgacctgcctgtttctacctcacgaagaggggagaggggggtggctcaaacnnnatctggagcacagataagacgacggagacctgtgcgggggnngagggaagtggggggggggcaatanaattaaacatattccacgggagtactttgccagatgcaccaaaatttgggaaggaccttggaggacagctt

SEQ ID NO: 49974 - DNA, 312 bp, Gossypium hirsutum
  unsure (1)..(312): unsure at all n locations; Clone ID: LIB3197-014-P1-M1-A3
atcannagttttatccaatcgttcgtctctatggcttttcctctctttctggtgaagaagagagtgaacaaaaatggagatggttaaaggtgttaggagtggggctgattctnnnnctttgccacgtgtccatggttgcaccattggaggagaatgnnttcacagatggacttacgtggtgcacatggctaaatccgagatgcctccgagtttccagcaccatactcactggtatgactcctctttgaaatcagttnnagggtaaagggcaatgctctatacctacgacaacggtatccatggattctctac

SEQ ID NO: 49975 - DNA, 314 bp, Gossypium hirsutum
  unsure (1)..(314): unsure at all n locations; Clone ID: LIB3197-014-P1-M1-B10
gtggtttgggagggattctggtggagatggaccgaattcttcgtccagaaggtgcggttatattccgtgatgaagtagggggtgtggtgaggggaanangntnggtggngaatgaggtgggacactaagatggtagacttttttttttggggttgggtgcgtggggagtattggntgctgttaatcaatattggaccgctgggggaaatacgacatcggcacagtatacagcagacggcaaccccngggggggatggcatgaactgagtttgtggattatatgagtttgacatgaattgatgaatttccagcct

SEQ ID NO: 49976 - DNA, 259 bp, Gossypium hirsutum
  Clone ID: LIB3197-014-P1-M1-B11
ctcttatttttgctcctgttagtttacgattgagatcttgcctcaagtgaaataggcagtgcatagcgcaggcggattcattgtcttgttccttggcgatgccatctctgacgccgagagcattatgttaccgcgccggatttcagcctattcgcgtgtcgtacggtttggccgctcctgaacggctatgaacactgcgagcctatgcctaatagagcgtggcggatgtatagctgctcgtccttgccgactagggcct

SEQ ID NO: 49977 - DNA, 329 bp, Gossypium hirsutum
  unsure (1)..(329): unsure at all n locations; Clone ID: LIB3197-014-P1-M1-B12
atgcaattaaaatcnnnaatgggagacttttgaagtcggtgttcatataaaataagcatattataatccgtggaaaaaattagtgcttgtatcgtatcangcncatgtttcttctatttgtatacaaaatggtgactgatnggttaaccatgagggtggggtcaggggggatggtataattatattatactatatcagtcgaaaaattatatacaagtttttataattttgcataatgatgtatataactattaacagatgctcatctcacttcataaagtatcaagatcattactgtacattagcaacttgagcattatttatttgca

SEQ ID NO: 49978 - DNA, 254 bp, Gossypium hirsutum
  unsure (1)..(254): unsure at all n locations; Clone ID: LIB3197-014-P1-M1-B2
atcattcttnancttgggggagtgtttgacagtttgaaggaactgtccttggttagtggaaaagctgcttggatggcatatttggacatgttgtgttgaggttgttggtggngnnnagggtgacactgcattactctcagctgttgctgggttgtggggtgtgtttgttggctatgttttgagctcggggatcgtcaaggatcatcgtcacactatcaactattatttggtacttttgaagtttgtnatttaga

SEQ ID NO: 49979 - DNA, 102 bp, Gossypium hirsutum
  Clone ID: LIB3197-014-P1-M1-B3
gatccgaatgttttttttctttttttttggagataagtgaaaagggtaattgtgttgctcctgctacaatgtctccaatggctttaattttttttttttttt

SEQ ID NO: 49980 - DNA, 320 bp, Gossypium hirsutum
  unsure (1)..(320): unsure at all n locations; Clone ID: LIB3197-014-P1-M1-B4
caaatttccaaacactaggtgggtgnnactgcaggntgctaagacaagccgagaaacaaagtgaaatattgctgagagtttgtggagatgagtgccttgagtgagggtcnnacccaaattgtgatccctttagcttccttggtgggcatnggtttnncnaggtagagtggaggaggggcnctagggtgaagctattatcacaggattcaagcaatggatataaacaaaaactgattgaatctgatgaagaagaannnngtattaacaatcttgagatttccatcaagtgtactgagattcaacatgccatttctgttggt

SEQ ID NO: 49981 - DNA, 332 bp, Gossypium hirsutum
  unsure (1)..(332): unsure at all n locations; Clone ID: LIB3197-014-P1-M1-B5
cttcttcatcttctttctcgagagagggnctgaaaatcactgcgaaaaaaacatacattgtccaagtgaaacatcaagataagccttctttttaaagtgatgatgattggcacagntggagtttacaatcactcaccgattccccacccgagtcactgcnaagtgtacatatactgaagcgtgttaatggcttcgctgcttctcttaatgaagaacaagctgagtctcttagcaaatcggaatcgattctgggtgtttatgannaggcggctacactctccatactactcgttcacctcaattcctcggccttgacgccgattttgggcttt

SEQ ID NO: 49982 - DNA, 222 bp, Gossypium hirsutum
  unsure (1)..(222): unsure at all n locations; Clone ID: LIB3197-014-P1-M1-B9
ggaacctcttttgattctttgtggggctccgtgaaagctgctgttgtgctgatccaagttattttttattttgttnatnancnnntnnnnatttgattttttcaacaatagcttcattattgtttgtnctgttttttagatgttgttnanngctnaatgatnaatcaaatcgtgaaactccaacttttgtgtgctttgtggagagcagagatttattgttct

SEQ ID NO: 49983 - DNA, 144 bp, Gossypium hirsutum
  unsure (1)..(144): unsure at all n locations; Clone ID: LIB3197-014-P1-M1-C1
cggacgcgtggggtttttgaaaagaaatctcgagaacctctcttcattctctggttcctccgtgaaagctgctgttgtgctgntccangtgatataccagtgttgagatgancnntgttggatttgattttggcacgagagctg

SEQ ID NO: 49984 - DNA, 372 bp, Gossypium hirsutum
  Clone ID: LIB3197-014-P1-M1-C11
gccatttcgtggtttaagggatttttttcattcgtttcttctcacgctcgattgccttacaaaaagagaaaatgaccaagtgttacccaactgtgagcgaggaataccagaagtcagttgaaaaggccaagaggaagctcagaggtctcatcgctgagaagaactgtgctccactcatgctccgtttagcgtggcactcagctggaacttttgatgttaagaccaagaccggaggtccattcggaaccatgaagcatcctgctgagctcgcacatgctgctaacaacggcctagatatcgccgtcagacttctcgagccgatcaaggagcagttccctaacctcacctacgctgacttctatcagcttgctg

SEQ ID NO: 49985 - DNA, 419 bp, Gossypium hirsutum
  unsure (1)..(419): unsure at all n locations; Clone ID: LIB3197-014-P1-M1-C12
caccgactaaagttnaaacccacacctttgaatcttcatgaaactgctcgaactaaccgaacacctacacccagcctatgtgttattgggtgtgtggcttccaanctacaatcatcgatctccgaggctcgaaactaaccaatccgnnntcactgcggcgggtaggtggnagccaatccacaagcatctggcagccatggcagaagatggagtcgtaacactctacaacaacacggacatcaccgnctccaagaaaaagccagtctcgatcaaagtgggcctggcacaaatgctccgtggcggagccattctcgaagtttccaacaccaaccaagccaaaatcgccgaagaagcatgcgcctgggngtaaccntcnctggacccaaccgccacggcatttcacgcatgccggatcctgc

SEQ ID NO: 49986 - DNA, 329 bp, Gossypium hirsutum
  unsure (1)..(329): unsure at all n locations; Clone ID: LIB3197-014-P1-M1-C2
aacctgaccaactgtaanattcgtancaccttgtccggacactccggttatgtgaatacggtggcggtttcacctgatgggtctttgtgtgctcagtggaggaaaggatnnactnattctgttatgggatttggctgaaggaaagaagctttataggcnngatgcaggttaggtgattagctcgctttgctttagtcctaataggtactggctttgcgccgccaccgagcagggtatcaagatctgggatctggngagtnagagcatttgggaggacttgaaggttgatcttaaggcagaggctgaaaagtctgacgtcacttgacatc

SEQ ID NO: 49987 - DNA, 113 bp, Gossypium hirsutum
  unsure (1)..(113): unsure at all n locations; Clone ID: LIB3197-014-P1-M1-C3
tagacagnaaagtgtttataactttttgcnccngaaccccattagctttgactgtccatatcattatcatcattattattattattattattttttttattatatttttcccc

SEQ ID NO: 49988 - DNA, 323 bp, Gossypium hirsutum
  unsure (1)..(323): unsure at all n locations; Clone ID: LIB3197-014-P1-M1-C6
gtcgtncccatcggcgctgtggagggggtcaggctctggctgggcaattccgcctacatttactggtccgtttccttcatccagatgctggggcagtgggtgggggtcgncgngnattccatcggcgtcctttttaaaaaagaagggtacaggagccctcggtgggggcgtgttggggatctcttttggggtcgccatcgcagcatatggggaagctaaattcgacacttggggagtgattttgcagttgggagctgnagcttttcaggcgtccaggttggtcatgatccaaatcttgcttacttctaaagggatcaccttga

SEQ ID NO: 49989 - DNA, 246 bp, Gossypium hirsutum
  unsure (1)..(246): unsure at all n locations; Clone ID: LIB3197-014-P1-M1-C7
actctctacacttgcactngggcctttctgtgacttcctcactctctctatacactttcccatctacctaagcctatctggtgtgggaggcagagctggtcccanatttctgcatattaaggcgagccgtgagcgtgaatttcggggggattttactatggagcaggggttcaatagatcaaaccaattggccagatacatagttacaagatctcaacttggggggactgggatccttgatgctac

SEQ ID NO: 49990 - DNA, 79 bp, Gossypium hirsutum
  unsure (1)..(79): unsure at all n locations; Clone ID: LIB3197-014-P1-M1-C8
actaaaaccgttgtcnctttggaaatgccacgcgcggacaacagagagctctacacgcaacccatcgacctaagaccat

SEQ ID NO: 49991 - DNA, 357 bp, Gossypium hirsutum
  unsure (1)..(357): unsure at all n locations; Clone ID: LIB3197-014-P1-M1-D1
gaaagaatgagcccttcaatgaaggaaacatcgttagaaacaatggagaaaaagggagaggatgttaatgggataatgaagaaggagcaagataagttgttcgatccaagngaancccctcctttccgtattaatgatatccgagctgctattccaaagcactgctgggtcaagaacccttggaggtctatgagttatgttttcagggacgccattgtcatctctgcactcttagcagctgcactttatttccgtanctggttcttttggcctttctactgggttgcccaagggaccatgttttgggctctctttgtccttggacatgattggggacatggaagcttctctgataat

SEQ ID NO: 49992 - DNA, 417 bp, Gossypium hirsutum
  unsure (1)..(417): unsure at all n locations; Clone ID: LIB3197-014-P1-M1-D11
ctaaaatcaatagaagcacctaaaaagaattcagcatctttatctgttttttgccgccggagtgagaaaaagggagatcggaaatgtcatcggagccgccaccttttcaggaagcacctcgctgcgacgtctgcaaatgcagcttcaacactttcaggggccggcaccattgccgatgttgtggaaggacattatgccatgaacattcatctgatcaaatgcctttacctcaatttggcatactttcgtctgttcgagtttgtgcagattgttccaataactcttcaggatctgcaaaagctgaccctcagcctcctttaggcggagttggttttgctactgacgaagttgctagattaaatattaacgcanatgtgggttcacaaactganagcactgcaaaagcacagcctgttg

SEQ ID NO: 49993 - DNA, 361 bp, Gossypium hirsutum
  unsure (1)..(361): unsure at all n locations; Clone ID: LIB3197-014-P1-M1-D12
ctttttgttccttnnccaagggagagtgtgatctgttcttcttcacttcatttcactaacccatggctctttccgtctagaaaaccgacgtcggccgcnantncntggtcaaggacatgtctcaggctgacttcggtcgtctcgagatcttgttgggcgaggtcgatatgcccggtctcatggcttgccgagccgagttcggccctgcccaacctttcaagggagccaaaatcaccggttctcttcacatgaccanccataccgctgtcctcatcgaaaccctcaccgacctcggagctgaagtccgttggtgctcttgcaatatcttctctacccaagaccatgccgccgtcgccattgc

SEQ ID NO: 49994 - DNA, 357 bp, Gossypium hirsutum
  unsure (1)..(357): unsure at all n locations; Clone ID: LIB3197-014-P1-M1-D2
aagaaanaaaccatggcaacgaatgtgnnctgggttttgggttcctggccgagtgcatatgcgatgaggccaaggattgcccttaaccttgaggggtgtgatgtgaggaatncattgnagagaagttatgggaaggcaaaagcgagcttcttttccaggcnnttggtgttgagatgaggggggcnagtgcttattcacggcgataacaagccaatctgcgaatctctcatcatcgtacaatacatcgacgaggcttggtnttncaggggggtggtatttccttctgatccctgtgaacgtgctgtcgctcggttttgggctgcatatcttgacgacgaggggttcccagcggtgaaa

SEQ ID NO: 49995 - DNA, 86 bp, Gossypium hirsutum
  unsure (1)..(86): unsure at all n locations; Clone ID: LIB3197-014-P1-M1-D5
cccacnctnncntttacgcgtgtttccangcccatnttccaattccttcttatctcgttgcataagggcctgcttttctatttgaa

SEQ ID NO: 49996 - DNA, 359 bp, Gossypium hirsutum
  unsure (1)..(359): unsure at all n locations; Clone ID: LIB3197-014-P1-M1-D6
aataccttcttcttctttcttgttggggntcttcaagtgttgctgtcgtaattcaagaaccttaatgaaataggagtataggaaagggaaaggcctatcatgtttttgannnnnctatggcagcaaggtactggtgttatcagtgttctcaagtggggactggtattatggaagctgagtgttaaatgcccattttgtcggggtgggtttattgaagaaatgagcaatggtacgacagacagtgctccagacatggattnccatatncaatctgatcgagcactctcactatgggcacccatcttgttaggtatgctgggtaatccttgtcgccgcagaagacttagacgtatcgagtt

SEQ ID NO: 49997 - DNA, 263 bp, Gossypium hirsutum
  unsure (1)..(263): unsure at all n locations; Clone ID: LIB3197-014-P1-M1-D7
acttccnctttgtcacgagagaggggnggagcttntcttaaaccaaaagctggagaaattcaaatataaaaaagagattctttttccatatatgtgagagtgagacagtattaananacaattaagtggaaatcgagtgcattttatttctcttttaaggggcaaggaagaaggatgacagaagaangaaaactttcgatcgaaccatccaagcttttgatttttgttatataaaaccattatattgcaagtataaataatcc

SEQ ID NO: 49998 - DNA, 79 bp, Gossypium hirsutum
  unsure (1)..(79): unsure at all n locations; Clone ID: LIB3197-014-P1-M1-D8
gcggtggggggagggtgnnngagacattnnttgaggccctcagcgatactgacttgcaaatcaatcatctgacttgggt

SEQ ID NO: 49999 - DNA, 340 bp, Gossypium hirsutum
  unsure (1)..(340): unsure at all n locations; Clone ID: LIB3197-014-P1-M1-E1
attaaaagtcagaatgagaaagacaaacttgctgaggcaaagagattggtgtacgtgagaggttttacagagggaactatgattgttggagaatatgctggaagaagagtccaggaagctaagccgctgttgaggaccaaactgattgagacgggccangctataatttatagtgagcctgnnaagaaggtcatgtcaaggtctggtgatgagtgtgttgtggctcttacagatcaatggtacatcacatacggggaaccagaatngaaaaaattggctgaggagtgcttatccaacatgaatctatactctgatgagacacgtcatggctttgaacata

SEQ ID NO: 50000 - DNA, 139 bp, Gossypium hirsutum
  unsure (1)..(139): unsure at all n locations; Clone ID: LIB3197-014-P1-M1-E11
ttccgtcnctaatggaaccgacttcagcaccagtccaaactcttaatttccattcacatttttcaaaattaaatttattgtgggtgttgagtggggggtctgngnnnnatttgggaggctgtttctgaagatggaaatc

SEQ ID NO: 50001 - DNA, 234 bp, Gossypium hirsutum
  unsure (1)..(234): unsure at all n locations; Clone ID: LIB3197-014-P1-M1-E2
gcggtgcctgctacgagctccggtgcancaatgatcctcaatggtgcattagtcgaaccataaccgtgacagccaccaacttttgtccacctaactatgctttatgtagtgacnntggcgggtggtgcaatcccccacgagaacactttgatttggccccaccggtattattgtggatagcanaatatcgagctggaatcgtccctgttatgttcagaaaggtgtcatgtgtga

SEQ ID NO: 50002 - DNA, 260 bp, Gossypium hirsutum
  unsure (1)..(260): unsure at all n locations; Clone ID: LIB3197-014-P1-M1-E4
gtggtntagaanactgnccctggctggaantgggttggcttttggctcattctcggccccatcttgtggggtttgccttgcttgtgcctttggatgtggtggtgtggntcgttccnnntgcttgccgcggctgcttttcgcttcaggcttttgcgtgggtcaggtgtttgtgttggttggtganatcatgtgcaccaagaagccatatcatttttgactattcgcgcaataccattcctatcattcactttcacctgcaa

SEQ ID NO: 50003 - DNA, 360 bp, Gossypium hirsutum
  unsure (1)..(360): unsure at all n locations; Clone ID: LIB3197-014-P1-M1-F1
ccagaaacaggcgctgagaaagaaaccatgtctcaagaagatcaggaggaagaagttgggaaactggccgtccgcctagccaacgccgtggtactttcaatggtcttgaaatcagccttggagctgaacataattgacacaatctcagccgctggtgatggcgcgtttctgtcgccttttcanattgcgagtgcccttccctccaagaatcctgacgcaccggtgctacttgatcgaatgctacgcctgttggccagccattccattctcaaatgctcagtaaaagcaaaggaaaaaggagaaattgaaagactgtacggtgcaggcccactatgcaagttccttgttaagaatcaagat

SEQ ID NO: 50004 - DNA, 343 bp, Gossypium hirsutum
  unsure (1)..(343): unsure at all n locations; Clone ID: LIB3197-014-P1-M1-F2
cggacgcgtggggttcaagttattccccattttttggtctttctttatgccaacggaaaatcaaatgaaagacatgaaacagaattccataatggggtcgttatgtcaccgaangccagatcgcgtgcgtaacaggcggctctgggttcattgggttcatggctcatcaagctgctcttggaacgcggttatgtcgttcgagccactgtgcgcgaccctgacaactctaagaaggtgaagcatttactggagctacctaaancaganacgcacttgactctttggaaagcagatttagctgaagagggaagctttgatcattcaattcaaggtttgacgggtg

SEQ ID NO: 50005 - DNA, 356 bp, Gossypium hirsutum
  unsure (1)..(356): unsure at all n locations; Clone ID: LIB3197-014-P1-M1-F3
cccacgcgtncgatttagggaaaagnnggccgcgtgcatcgaattgccgatctaggtgcccattaatattttctattttaaattctcgagggtgggggtgtggggggagtcatttcnaccatggcttccaattcggagaagcccgctactgcggatggggnggggggtgttgatggtcggggagcaaaagttcaaagcctgaaacatccaccactgagaagaaaacttcaacacctgagccttcaactgggggttcacagncnagacaaggaggggccttccctcccaacgctgtgcctgggcctgggtttgccccacccaatccattggattttgcaggcatgagtggccttctt

SEQ ID NO: 50006 - DNA, 65 bp, Gossypium hirsutum
  unsure (1)..(65): unsure at all n locations; Clone ID: LIB3197-014-P1-M1-F5
cttacccgtnntgtttaagaaaaaagnnngccctagnaatgaagctcgatggagggagaaaaccg

SEQ ID NO: 50007 - DNA, 344 bp, Gossypium hirsutum
  unsure (1)..(344): unsure at all n locations; Clone ID: LIB3197-014-P1-M1-F6
cggacgcgtnggggagaacaaaagtnngataaagatacctacgtgaagccacgccgagggagtactgcaagtgagagccaagcaaattctagagacgagtgtagagntnatggcnncaaggatccaaaaaatacctacgtgaagccacgccgagggtgtncttgaagtgagagtgaaggaagattccacaaaggagcctagacgtcatggcagcaaggatccaaaaaataaattatctgcgaagttgagtgaagatgataaatatagtcaaatgagcaagtgcccctacaaataaatttgaagccgacgatgatgattttgatgatttcgatcccaggggagct

SEQ ID NO: 50008 - DNA, 298 bp, Gossypium hirsutum
  unsure (1)..(298): unsure at all n locations; Clone ID: LIB3197-014-P1-M1-F7
aagctggcacgcctgcaagtacccggcccgacccacccgtccgacccacgccagccgctaaacaagaaagcntgtgggaacaataccaggaggcagaaggtgggaaactggccctcctcctagccaacgccgaagcacatgtgagggtgttgaaatnannctcggagctcaacataactgacacactctcaaccggtggtgttnnagagtatatgagagcttgggagattgcgagtgcccttccctccaaaaatcctgacccaccggcgctacttgatcgaatgctacgcctgttggc

SEQ ID NO: 50009 - DNA, 371 bp, Gossypium hirsutum
  unsure (1)..(371): unsure at all n locations; Clone ID: LIB3197-014-P1-M1-G1
tctagatcgcgaggccgccctttttttttttgttttttttacttaaaactgaacactttttgttctctcatccaggatacaacttttatgcattacaagattgaagacaactcacngcttttctaactaatgaattggaatgatagatatatacatgnncactctgacattacaccaacggnngaaccactctatatggcagcacattcttcttatttctccttcatctctagtcttctttttctatataaacaagtntgntcacagattacggtcaaggtaagggatgctttagaaacttctatccacttcctataacaacctacaaggcctcgtatttataagtttgaggtgctatctncagctttttg

SEQ ID NO: 50010 - DNA, 328 bp, Gossypium hirsutum
  unsure (1)..(328): unsure at all n locations; Clone ID: LIB3197-014-P1-M1-G11
atactctccacactaaaccaaactacaggaagtactgaatctctgaaacacaaatctcgctttcggaaaagcctcaaatggcagaccaaccgcaggtttatgaactcaacaatggaaccgtggttgttaagattaccaactatggctgcactatcacctcattgtctggtcctgacaaaaacggtaaattagccgatgtcgtcctgggattcgacactgtcgaaccgtacgtgaaaggtgcttcaccttattttggatgcattgtgggaagggttgcaaacaggataaaaaatggcaagtttactcttaatggaacggngtactcttt

SEQ ID NO: 50011 - DNA, 78 bp, Gossypium hirsutum
  Clone ID: LIB3197-014-P1-M1-G12
atgctttggagggggggccaggcgacacgacgtgctgaatctgggacacacaaggggtcgctttcggaaaagcctcaa

SEQ ID NO: 50012 - DNA, 356 bp, Gossypium hirsutum
  unsure (1)..(356): unsure at all n locations; Clone ID: LIB3197-014-P1-M1-G2
gtcaanttgncttggttccaaggggcnnntccgacttgcagggtatccatatgagaattaaagctattgaaaaagcagttctggaaatggagaaagcttgcaatggtggngnnctntgatcaattccaaactagagactgcagcaagacagattgagnnattgagatatgtaagcagatcgtagtggacaaagtgttatagcaaagaggcacgtaagtgctagacaagaagaggaggaacttggcaatgggctcagtncctnttgtgancattgagagaccaacacctgaaatatctgaagaaaatgagatgatgacaaaagacattatacttgatcaggtatctgaatgctcgtc

SEQ ID NO: 50013 - DNA, 336 bp, Gossypium hirsutum
  unsure (1)..(336): unsure at all n locations; Clone ID: LIB3197-014-P1-M1-G9
ggagattgcaaaggctgtaatgcatcttgacaagttcaagcagaaacatacgaaagtggaggatccaaaattgaaaatggttcgtggtgatcttgagantngaatagacatcttaagaaatcaagctgatacctatgatgacaaatgncctattatagatgctgttgtatggcatgatggagaagtatggagggttgctctcgatacacagagccttgaggatgatactaaatctgggaaactggctgannttgtgcccttaactaattacaggattgaacgaaaatatggcgtttttagcaaattaaatgcttgtacatttgttgttaatgtgta

SEQ ID NO: 50014 - DNA, 357 bp, Gossypium hirsutum
  unsure (1)..(357): unsure at all n locations; Clone ID: LIB3197-014-P1-M1-H1
cccacccttncgctcanaaaattatnnnnngtcagtttgaaagtgttcttcagaggtggctatgaaacaagttgctaattctgctatcatggcgtttggcggtgtggggtcatnctgtcttcttaccagacaactgcatgcttctccagggggcaagnnaattgtgggggtgttgtacatggccaatgagtactttacgaagaatcccaactttgttggttgtgtggagggagccttggggttgcgccaatggctcgnnttgcggggtcgtcagtatatcgttaccgacgacaaagaaagaccggactgcggtaagtataacaacccctactgtcttttttgccaatgtcgatgcct

SEQ ID NO: 50015 - DNA, 304 bp, Gossypium hirsutum
  unsure (1)..(304): unsure at all n locations; Clone ID: LIB3197-014-P1-M1-H10
aatgggaacagtagngaacttcgttcattggccagagctgattacttgccttatgggattgactttgctaatggacctagagggcgggtattaagcggnnnnncnacggcggatgtcatagctgaacttttggggtttggcgattgcnttgggtatactgaagtggtaggtggtagacaaatactgggaggagttaactatgcatctgctgctgctggaatcagagaagaaactggacaacaactgnnaaatcgnatgagcttcaattggcaagttaaaaattaccaacaaacaattcaacaag

SEQ ID NO: 50016 - DNA, 296 bp, Gossypium hirsutum
  unsure (1)..(296): unsure at all n locations; Clone ID: LIB3197-014-P1-M1-H2
aaacngtgaaattctttttccttttgtctcaagcaattcaaggggaaagagggtggtttgggtttggttctcattgttagggtgtgtgggggtgnnnnnnnnnnntgggaagaggtagggttgaacttaagaggattgatggcgtgggcgcggtggggtggcttttgtgaaagagaagaaatggtcttttgaagaaagcttatgagctttctgttctttgtgatgctgaagttgctctcatcatctnnnncggggagaggaaagttgtacgaattttgcagcagctcaagcatgat

SEQ ID NO: 50017 - DNA, 93 bp, Gossypium hirsutum
  unsure (1)..(93): unsure at all n locations; Clone ID: LIB3197-014-P1-M1-H4
aaaaanagaaaatatagtgtgaatttttgtaaactcaaagctccgtcatgaatgtaagtttaaaatatgtttggattttttcccccaataaaa

SEQ ID NO: 50018 - DNA, 108 bp, Gossypium hirsutum
  unsure (1)..(108): unsure at all n locations; Clone ID: LIB3197-014-P1-M1-H5
agattgtgtctatatattctttgaagatattaatcagaaaaatggcgctggtttgtgtgtgggtggggnncnnnnnnnntcagngttcatcctctctgcttggcaaga

SEQ ID NO: 50019 - DNA, 261 bp, Gossypium hirsutum
  unsure (1)..(261): unsure at all n locations; Clone ID: LIB3197-014-P1-M1-H6
cccacgcgtncgcccacgcgttggtagctcaaaaccctaaatctcagagtagttagttgacgaaagttcttttctttaaatttttggcgagaggggtagggggatggggaagatgannccgattttgatgaaaggtcatgaaaggccattgacgnttgtgggggngtgagggagttggagaggggtngnnntcatgcgctaaggaccatacccctaccgtttggttcgccgacaatggcgagcgtctcggcacttatcggg

SEQ ID NO: 50020 - DNA, 340 bp, Gossypium hirsutum
  unsure (1)..(340): unsure at all n locations; Clone ID: LIB3197-014-P1-M1-H9
gcctttttctatatncnaatctctacctagggggagaaaaatatcaagaaagagccaatctcgaaatttctgcgaaaatatggtagatacctgaaattctccnnttaaagcgacgccctgcaagcgactggattcactttgacgatnnctatttatggtgtgtttgaaatngtcctatgatttgggacattgcaggaaccaggtatacaagacaaaatttaagattgtacttggaagggggaagttgggnttgagtgaactctgacctctcatctcgggcttcgttcctgcaacagcatgaacaggatgtttggaaaagttcactctccaacaaattgta

SEQ ID NO: 50021 - DNA, 228 bp, Gossypium hirsutum
  Clone ID: LIB3197-015-P1-M1-A1
gccaagaaacaaaactgagttttattcttattgaagaaacatcttttttcccttgctttgccgtactccgtaacccttcccgctcgctattcggactctaccgagtattcaagagtttgattattactcaactctaactgccattaagaccagaggctggagccggagaagaaaaagataatctatgggggaagacgcatgaagaggttcataatgcccgaagcttat

SEQ ID NO: 50022 - DNA, 264 bp, Gossypium hirsutum
  Clone ID: LIB3197-015-P1-M1-A10
atttgtgcaagcgaggaaatgttgggcatgcaatgcagttagtggaaaaaatggaggctcatggttatccaactaatactgttacttataactctttagttagaggtctttgtatgcatggaaacttgaagcaaagcttgcagcttttggataggttaatacaaaaaggactagttcccaatgaattcacttattctttcttgcttgaagctgcttataaggaaaaaggtgtaaatgaagcaacgaagcttttggatgagatca

SEQ ID NO: 50023 - DNA, 337 bp, Gossypium hirsutum
  unsure (1)..(337): unsure at all n locations; Clone ID: LIB3197-015-P1-M1-A11
aaccaacagccaccaccacatacccttctgaaacctcacccacaccaaactccagaaccagcctccgttatcaatggcgatgatatctacatattgcccacatttcaacggacttcgccgatcatctcccaagctcgacagttctcaatctcaatctttcctttaacacatcaactctcagcttcgccttgcttcgtctcgtaaaccttgcagagctgttactgccatgngccggttccggaagttctttgttgggggtactggnaaatgtatggacanaagactcatcacanagctgttctgacttgacagcgcaagtngagactgtgtgatgtgt

SEQ ID NO: 50024 - DNA, 454 bp, Gossypium hirsutum
  unsure (1)..(454): unsure at all n locations; Clone ID: LIB3197-015-P1-M1-A2
cctgtgagtgagtgagagagagaggagtctgctatttgctaaggtgcagtttggagtggttttcataatggaaagaggtgcaaggatgctgttgatctcagtcatggtcctgctggtccttgcttcaaatgctgaagggagaagactcaaagaggaagcttaccaccctcagaacttcctcggagcctttggtactagtggtgggctagttccaacccctggtggaggtgttggccttaatttagggccgtcagtcttttgttcctatcctgggaccggatgtgttcgtgtccagcctactattcctggtagtactggtaccattggcgctggcacaccaccatgatagatgtcctgattcaagcttagagggtgttgaatgagcttcagttatggaggtctaagctgttgtctctttagtttggtgtttnttagtgtgtgtttgataggaaca

SEQ ID NO: 50025 - DNA, 347 bp, Gossypium hirsutum
  Clone ID: LIB3197-015-P1-M1-A3
gcctgccgtccggactgatggtggccgaccgtgcgtccggctttcgtagataactacacttttcgcactgatctgtttgagatcaagaaagtaagtgacatctaaccgtcgttaaaacgacaactgcttatctccaccgttctcatgactgccgggattgctgtcgttagcttctttgcattgccgtcagaattcactctcttcaattttggaactgaaaaggaagtgaagaattggcacttgttcttctgtgttgctatcgcattgagggctgtactcattatcggttatactacagaatattatactagcaatgcttacagacctgtgcacgatgtaacagatgc

SEQ ID NO: 50026 - DNA, 354 bp, Gossypium hirsutum
  Clone ID: LIB3197-015-P1-M1-A4
ctgagagatcctcgaggactccgaagaggaggactgtcaggcatcggtcctcgtaacttcgccgccaatggttctcgccagcgtggctttcttcgacatgcggataggattgatggagaagatcaacctccggctaagaggcgattgtcatcagctgttgtcaaggttgaagatggagagattgttgatgatgaagtagcaaaggatgccagtgacatggctgtcgaaggatctggtgcagtacatgagagtgatagaaagctttcgactcagcagcaaagtggttggtctagaagggatgtaaatcaaacaccactgaagaaggatgccgaagttccggttgctgagcatgtt

SEQ ID NO: 50027 - DNA, 235 bp, Gossypium hirsutum
  Clone ID: LIB3197-015-P1-M1-A5
cggacgcgtgggttcatttcgaaattcttggatgctagtggagtaatgtattctatgaataacaccttttcaatcaaaatcaaataaacatttcaataatccccatgttcgtatttcgaaagtaaaagggatccggatgataggcaataaaaaaaaagaattcttcctaaattttctattttgatgaaccagctcttaccagagttatgaacggacaatgagggacaaggaaacc

SEQ ID NO: 50028 - DNA, 328 bp, Gossypium hirsutum
  unsure (1)..(328): unsure at all n locations; Clone ID: LIB3197-015-P1-M1-A6
ctctaaaatacgtatttaaatacgtacggacgggttactcancagatcgtaacggaggtggtagcggcggcggcggttggatatttgatcagatcgtgatccaaatggctgaggacaagtataacctcaagaatccggcggtgaagaggatattacaagaggtcaaggagatgcaatccaatccctctgatgatttcacgagcctccctcttgaggagaatatatttgaatggcaatttgcaattaggggtcccagggattctgaatttgagggagggatttatcatggaaagatccaattacctgctgagtatccatttaagccccc

SEQ ID NO: 50029 - DNA, 454 bp, Gossypium hirsutum
  Clone ID: LIB3197-015-P1-M1-A8
agaagtttcagtctcttctctcctaacctttcctttcgcttggagagtcggatgggagggtttgcaaattgatgttaaatcggaatcgctttcagggggaaagggaaaatgtcatcatacgaaaacgttgtaggtgggaagctgaagctcaagggaaaagccttggatgttaaggctggtggaatcaagaagaaaaagaaacataagaagcagattcaacatgatgaccaaattacccagaacgatccctctgatgccgcttccgctggtgaaaccacagaagtttctgttgatcccaatgaagaagatatcaacaatgcggagatgtcaagtggggagaaggcggctcctcattatgatgatcatcttaccccagcagaaagacgatacattgagcagagggagcaactcgacgttcataggttggctaagcaagctaataaatctcatcgtg

SEQ ID NO: 50030 - DNA, 433 bp, Gossypium hirsutum
  unsure (1)..(433): unsure at all n locations; Clone ID: LIB3197-015-P1-M1-A9
atcctggagccagctaccctgctgcaggaccacggtggacccacgggagaagctggaggtgctggagaggacatacggggaaattgagggcacggtgtcgcgggtgctgggccgggagtacaaactgcccatggacgacctgctgccgcttctcatctatgtggtgtcgcgcgcccggtgaagcagacaggctgggaactgggggtgcagggcaggggcagggttctacccccaccatgatatcctctgacacctctgaaccccagggttgtttatggatgcagcttctctcagtacagatggggaagctaaggcccagaaaagggagggtcccagccagggtgctggggtgctagaggcagagtgagaaccacgccccaggtgtccagccatcctggccagggctccttccccagctgcctgtncatgacag

SEQ ID NO: 50031 - DNA, 450 bp, Gossypium hirsutum
  Clone ID: LIB3197-015-P1-M1-B1
gtttgctgcgcttgtctgtagtccatgtgactctctgtcctttgctttcgtttcccagtctcttactttttgaatctcagatcaggaaattatcaaatccgagccgccatggaggttaacgacaagcttttgaacacgggtattctcatagtagccaccctagtagtggccaagctcatatctttcctcataatgcctagatctaagaaacgggttccaccagcagtcaaagcctggccggtaatcggtgggctccttcgattcgtgaaagggcctatggtgatgctccgggaggagtacccgaagcttggcagtgttttcacattgaacttgtttaacaagaagataactttcttgattgggcctgaggtttcatcccacttctttaaggcttcagaatcagacctcagccaacaggaggtctatcagttcaatgtgcccaaccttcgt

SEQ ID NO: 50032 - DNA, 163 bp, Gossypium hirsutum
  Clone ID: LIB3197-015-P1-M1-B10
cactccttcatttctaccttcatacatttccacccaacgaaaatcagatagtgcatcccaacccacatcgttcaggccggtatccaattcaaccatgcctgctgggagctctactacctttaacataacatccatcctgatcgtcatataccaactctccaca

SEQ ID NO: 50033 - DNA, 319 bp, Gossypium hirsutum
  unsure (1)..(319): unsure at all n locations; Clone ID: LIB3197-015-P1-M1-B11
ttacgcatttttttacacgtccggaaccagnggaagcnnngnggggtgcctttgaaaggagtggattcgaccgcttcaagctttggcggtatgtttgagaaattcagatcagatgcacccaactacaaagccaatttcatccttttcttggccgataaagacccctctacctctcttagttggtgtcctgactgtgtaagagctgaacctgtgatatacaagaaattggaagcgtcgccagaggatgtgacactgctgagagcatatgttggtgacatgcccacatggaagaatccacagcatccttggcggcttgact

SEQ ID NO: 50034 - DNA, 337 bp, Gossypium hirsutum
  unsure (1)..(337): unsure at all n locations; Clone ID: LIB3197-015-P1-M1-B12
tcgttcaaattcagtttggaagtttccatgtaaaagaaatgaatttcatgtggtttgatagggaatcgagttcaaagacagcggtttttaagaagaagaattcttaaacatacagactacctgtctttgcttggaaactcaagtttatctctttgtccgaaagaagaaagaggcatggagaagactgatgcatcatctgctgctgctgctgttgctgatgctaagatatcatcaatctntatctatcccgtaaaatcatgccgtggaatttctgttccacatgcacccctcactcctactgggtttcgatgggatcggcaatggctttgtgtgaatc

SEQ ID NO: 50035 - DNA, 448 bp, Gossypium hirsutum
  unsure (1)..(448): unsure at all n locations; Clone ID: LIB3197-015-P1-M1-B2
cggacgcgtgggggaaaagatctggcatcatacattctacaatgaactccgtgttgctcctgaggagcaccctgtgcttctcacggaggcacctctcaaccccaaggccaatagagaaaagatgactcagatcatgtttgagaccttcaatgtacctgctatgtatgttgccatccaggctgtcctctctttgtatgccagtggtcgtacaacaggtattgtgctggattccggtgatggtgtttctcacaccgtgccaatctatgaaggatatgcccttccacatgccatcctccgtcttgaccttgcaggtcgtgatctaaccgatgccttgatgaagattcttaccgagagaggttacatgttcaccaccactgctgaacgggaaattgtccgtgacatgaaggagaagcttgcttatgttgccctggactatgagcangaactg

SEQ ID NO: 50036 - DNA, 314 bp, Gossypium hirsutum
  Clone ID: LIB3197-015-P1-M1-B3
atatattcttgaccgccatccaaagagaaggctaactgctcatcaagtcttgtgccacccatggattgtagatgacaccattgcacccgataaacctattgattctgcagtattgtcacgcctgaagcagttctcagcaatgaacaaacttaaaaagatggctttacgagttatagcagaaaggctttcggaagaagaaatcggtggtctgaaagagttatttaaaatgatagataccgacaatagtggaacaattacatatgaagaattaaaagacggcctcaaacgagtgggttctgaacttatggaataaa

SEQ ID NO: 50037 - DNA, 354 bp, Gossypium hirsutum
  unsure (1)..(354): unsure at all n locations; Clone ID: LIB3197-015-P1-M1-B5
cggacgcgtgggaaaaatatcccctcagcaccgctcctattattataccattactctaccacagctgctatcattactacatacatgtccacccaaagtcgagcagttggcggcaccgagcacaactggtgccgagcggtggtcgggggaaccgggatagccgttttggctatcatttcttccaaaaaccccgatgtttcacatcttaaaaatgccctccacaagctccaaatttcccatcccattcttaggtctcgcctccattacagtcctactgccaacagttactcctncgttaccttccccttccctttcaatgaaaataagtactttaacccatctacaacatgtcaa

SEQ ID NO: 50038 - DNA, 352 bp, Gossypium hirsutum
  unsure (1)..(352): unsure at all n locations; Clone ID: LIB3197-015-P1-M1-B6
aaccagttcattatttggaaaagaacaacanggtattggaaaagtggtgtttctggtaaattcattggccctgatgggatgccttcagccatgccatcagcaatttctttctttttgtcaaattttaccaccgttgtactccacaacgagtccatgccacatcttacctcctcattatacagcgacacaaggatgactatcagtttctccggtcaaattcagtatttcaagtgggattcttggaagatctggtccttgattngngctgagcctagagataaatgcagtatctacaatgcatgtggaaaattcggtagctgcaacagtaacaatgacttgatgtgtaaatgtc

SEQ ID NO: 50039 - DNA, 390 bp, Gossypium hirsutum
  Clone ID: LIB3197-015-P1-M1-B7
tcggtttattatcgaaaacattcaccaccccagatgatatctttttctgcgtggtgtcactctcttcccataactccagctttttggtgaatgaatgagcattgaaaaagcttccatcttttcgagtttctgatatatgttttttttactatttacaaagggggtaaacttttatgatgattacttgctagatatagatgtttgagccctttcctcttttagaattatggattctgggagtaggatttacacggctgatgagttcaaattggatgctaaatggttgattgatccaaagcatctctttgttggtccaagaatcggagaaggagctcatgccaaggtctataagggaaaatataaaaaccagactgttgcaattaaaatact

SEQ ID NO: 50040 - DNA, 433 bp, Gossypium hirsutum
  Clone ID: LIB3197-015-P1-M1-B8
tcgctctctctctctttctctctttgactccgcccttttctcatggatccttttggtgtcttctgtactggggctcttcttgcctgcggtctttactggttcgtctgccttttagggccggccgagcaaaagggcaagcgagccgtcgatctctccggcggctccatctctgccgagaaagttcaggacaactacaaacagtattggtctttcttccgccaaccaaaggagatcgaaaccgccgaaaaggttccagatttcgtcgatactttttacaacttagtcaccgatatttacgaatggggttggggtcagtccttccacttttctccttccattcgagggaaatctcaccgggacgctacgcgcctccacgaagagatggccgtcgatatgatcgaagtcaagcccggagatcgagtcctggacgtcg

SEQ ID NO: 50041 - DNA, 425 bp, Gossypium hirsutum
  Clone ID: LIB3197-015-P1-M1-B9
gaaaacttcatcaaacaaggaaaaaacttgaagtaaaacaattgagagaagatgtcgtggcaagcgtatgtcgatgatcacttgatgtgtgatatcgagggcaaccatctctctgccgccgctatcattggccaagacggcagcgtttgggcccagagctccaatttccctcagttcaagccagaagaaatcactggcatcatgaatgactttgctgaacctggatcgcttgctccgactggattgtaccttggtggcacaaaatacatggtgatccaaggtgaacccggagctgttattcgagggaaaaagggccccggaggtgttactgttaaaaagaccaacctggccttgatcattgggatctatgacgagccaatgactccaggccagtgcaacatgattgtggaaaggctttgtgatta

SEQ ID NO: 50042 - DNA, 274 bp, Gossypium hirsutum
  Clone ID: LIB3197-015-P1-M1-C1
cccacgcgtccgctaagggagagaatccacaagcaaaggcaatagaaaatggcagaaaacgaagacattcagcctcttgtttgtgacaatgggactggaatggtcaaggctggatttgctggagatgatgctccaagagctgtattccctagcattgttggtcgcccacgtcacactggtgtgatggtcggtatgggccaaaaggatgcttatgtgggagatgaagctcaatcgaaaagaggtattttgactttaaagtacccaattgagcatg

SEQ ID NO: 50043 - DNA, 120 bp, Gossypium hirsutum
  Clone ID: LIB3197-015-P1-M1-C11
tcgcgctgctttagagttctggtccgctcaacactcttccttctctctaaagctaatactcagatccgcgagtaatttttgtcacaggcttaaattcttgcccctctgaaagtgaataat

SEQ ID NO: 50044 - DNA, 362 bp, Gossypium hirsutum
  unsure (1)..(362): unsure at all n locations; Clone ID: LIB3197-015-P1-M1-C2
agaatattgaaaagaactcacccggaagtcaaattctcaaaggttacctaatggccacccttttttatgaaccttcaactagaactaggctttcattcgagtcggccatgaaacgattgggtggtgaagttttaacaactgaaaatgctcgagaattttcttcggcagccaaaggagagacccttgaagatactattagaactgttgaagggtattccgatataattgtgatgcgacactttgaaagcggtgctgctaaacgagcggcagctactgcaggcattcccatcattaatgctggtgatggtccgggtcaacatcctactcangcccttttagatgtctacaccatagaaagagag

SEQ ID NO: 50045 - DNA, 297 bp, Gossypium hirsutum
  unsure (1)..(297): unsure at all n locations; Clone ID: LIB3197-015-P1-M1-C4
cccacgcgtccggaaggtgtcttaataaacgccttctttcttcttcttcttattcctttattgctttttagaatttttcttaatcgaaaatgagagagtgcatttcgatccacatcggtcaggccggtatccaggtcggaaacgcttgctgggagctntactgtctcgagcatggaatccagcctgatggtcagatgccaagtgacaaaactgtncgaggaggtgatgnatgctttaacacctttttcagtgaaactggtgctgggaagcacgtccctcgtgccgtcttcgtggatc

SEQ ID NO: 50046 - DNA, 303 bp, Gossypium hirsutum
  unsure (1)..(303): unsure at all n locations; Clone ID: LIB3197-015-P1-M1-C5
cggtcgcgtgggttctcttgtagctgctttcttgtggattgctagatttgagctccgaaagtattgcatttacagggtatttgcagtttcacgggatcttcatgtaatgggaaaatctcccggaaaatggattaagactgtgctttttggaaagaaaccttccaaatctagttatcctaaaggaagggagaaggttgacaatgacagccaggtattggttgcagccagngcatcagaaagtgatttggctgtggcttcctccttctcttcacagctcaatnctcatactactgagagagatga

SEQ ID NO: 50047 - DNA, 348 bp, Gossypium hirsutum
  unsure (1)..(348): unsure at all n locations; Clone ID: LIB3197-015-P1-M1-C6
caaggcctgtaagggctggccccctggtgaattgtcccatgccctatgtatctgtgagtcctgcagagatgacaaatcangggacgggatcatgtctagtcaccgtctgggaaaatgctccaggagtgaacacatttcaggctcttgacgatgtacctncaaactcttcngatgggtggccagcccgcatgtctgtgccgcctctgccagtgagtcagagccagcacacagcagctgacttgtaaagtgagagcanactgctctgtcagctgcttcttggactctaagcacatctttatgttagcatgcgtcttgagatgtgtacatctgtgtgtatggtcagcttca

SEQ ID NO: 50048 - DNA, 355 bp, Gossypium hirsutum
  unsure (1)..(355): unsure at all n locations; Clone ID: LIB3197-015-P1-M1-C7
tcgcttcaatagaaatccccgaattgagtttccagttcaaaggaggagccaaaatggcattgcctttggttaactatttctcatttgacggtgatgataaggttgtgtgtttgatgatcgtttcagacaatgtggtcggccaaggctcacacagcggtcctgcaataatactagggagctttcagcagcagaattattacatcgaatttgatatcgcaaacaataggtttggatgggctgaacgaagctgtgcgtgagctgcactttgttattttgtgttttggccatgaatatgaaagtcatctttntcttttgcttctatttttaatggaatggtgacaaaagggttattagc

SEQ ID NO: 50049 - DNA, 389 bp, Gossypium hirsutum
  unsure (1)..(389): unsure at all n locations; Clone ID: LIB3197-015-P1-M1-C9
gataagttgactctctccttcttattccttctgaagtaatgagatgtgcaaccttattagcatccctatttgtgaaaaggaaaacacaagtctggaaacccagacttagttttttagaatcatttatatacacagcaacctctgatctatcctcatgctccatttgcagcttacgaattaccgtccgggagtcaccctcgatctccacctctttcaagccaagatgtaaaccaagttgcagcgcataaagacacgccaccgcttctgcagcaaaggcggatgttgtttgttgaaagcggcatcgaaattaattttttgtctcgatccaaccggaccaacccaacttnctacacagagacgttcaacaggacattcgtagaacaagtgtt

SEQ ID NO: 50050 - DNA, 307 bp, Gossypium hirsutum
  Clone ID: LIB3197-015-P1-M1-D10
aaagaaactctgaaagccaaagggagggcgagagtagtggaaataggaaggaaaaatgagcttaaaacatcaccataactccaactccacagcagctgctcaatctctctcttttgatgacattgccgacttcttctctcttccccttgacgacgccgcttccactcttggcgtttgcacctctgttctcaagaaaatctgccgtgaaaatggtctcgacagatggcctcaccgcaagttttaagctggaaagagcgtcgaagaaatcaagaggcatgcagctagagaaagaaggggggaaatcgct

SEQ ID NO: 50051 - DNA, 283 bp, Gossypium hirsutum
  Clone ID: LIB3197-015-P1-M1-D11
agttggaaaaatggcagagcgtgtgatcacccgagtacacagcctccgggagcgtctggatgacacccttattgcccatagaaacgaggttttggccttgctcacaaggatcgagggtaagggaaaagggattctgcaacaccatcaaattatcctagagtttgaagccatccctgaagaaaccagaaagaagctcgctgatggagcattttctgaaatattgagatccagtcaggaagcgatcgtgttgccaccatgggttgcacttgcagttcgtccaagg

SEQ ID NO: 50052 - DNA, 285 bp, Gossypium hirsutum
  Clone ID: LIB3197-015-P1-M1-D12
tttcttgtttaaaatataagaaaaaaaatcaggcgcaatgaccactgctggtcaggttattcgttgcaaagctgcggtggcatgggaggcggggaagccactatcgatagaagaagtggaagtggcaccaccccaaaagcatgaagtccgtattaagattctcttcactgctttatgtcacactgatgtatactactgggagtgtaagggttacactcctctgtttcctcgtatacttggtcatgaagccctcaggatcgtggagagtgtgggtgagggtgtgaa

SEQ ID NO: 50053 - DNA, 213 bp, Gossypium hirsutum
  Clone ID: LIB3197-015-P1-M1-D4
ctcgctcattgctatctttttgttccttttccaagggtgagtgtgatctgttcttattcactccatttctttaacccatggctctttccgtcgagaaaaccgccgccggccgtgagtacaaggtcaaggacatgtctcaggctgacttcggtcgtctcgagatcgagttggccgaggtcgaaatgcccggtctcatggcttgccgagccgagt

SEQ ID NO: 50054 - DNA, 178 bp, Gossypium hirsutum
  Clone ID: LIB3197-015-P1-M1-D5
tggggggggggaatctaaaatatcactccattgacagcataaaaaggttttagacaatctttcaacacccatagatatgacagttttaaacatgaaaaataggatagcttattaggctattcatgttcttatgaagcatctttcaaaagtaaaagacaagcatttctaacaaaaatga

SEQ ID NO: 50055 - DNA, 246 bp, Gossypium hirsutum
  Clone ID: LIB3197-015-P1-M1-D6
attcttttagctttcaccgacaaaaaaaatggcggcgaagcaaacgacgatcctagttgccgccatcctcgtaacggctttttacggcggcgcggcgacatcggcgcaggcaccggcagctgatccagcgatggccatgtcgccgtccgccatggcaccgacgccggactgtatgacgaacttgctcaacttatcggattgtttgacgtacgtggaggccggaagcaacttgacgaagccggacaa

SEQ ID NO: 50056 - DNA, 173 bp, Gossypium hirsutum
  Clone ID: LIB3197-015-P1-M1-E10
atggccgggccagaccaacgcgtttgttttaatcgaaggggcccactttaccctggcatccaaactctgatttgcctttcaatcctcaaagggcgggggaccaccagcctttatcggagaaaaaaaaaagaatgccaggttcgtgtgtcaaattgggtaaagagaggaaaaag

SEQ ID NO: 50057 - DNA, 344 bp, Gossypium hirsutum
  Clone ID: LIB3197-015-P1-M1-E11
cttccaacagtggaaagaaaagaatcagaaagtgtaccggcacgccgaggaggctgagaaaaggtttgaaaatttcaaggggaatttgaagtatatcctagagaggaatgcaatgagaaaagcaaacaaatgggaacaccatgtgggattgaacaagtttgctgatatgagcaatgaggagttcagaaaagcttacttgtcaaaggtgaaaaagcccatcaacaaagggataaccctgtcaaggaacatgaggagaaaggtgcagtcttgtgatgcaccctcctccttggattggaggaactatggagttgtgactgctgtcaaggaccaaagttcttgtggaa

SEQ ID NO: 50058 - DNA, 223 bp, Gossypium hirsutum
  unsure (1)..(223): unsure at all n locations; Clone ID: LIB3197-015-P1-M1-E4
cttcttccctcctatttcccttaaaaaccacacaccaccaactcaaatttcacctcttaattctaaaatcaacacagccccatcacatccgctcagatccatcaaaccaagagcagcgaaaaatggatcttaagttgcttgtgattaagagaagatgactngtgataagagagggcagttcggtgataccactttcacccaaagtgttgttgggtgggttagc

SEQ ID NO: 50059 - DNA, 418 bp, Gossypium hirsutum
  unsure (1)..(418): unsure at all n locations; Clone ID: LIB3197-015-P1-M1-E5
ttcttttttcaatctctcgcaatcccttacccntaagatacacaccctaatgcgaatggcgacccgaattcgatttttctcatacaatcatattatgtgtgtcaatcaaatctcacactctcttcttacattctgcaaagagaaaaaagagagagctaatggggttcaattttgagagagaaaaacatttaatgtcaacgaatatctgctaagaaacaaattatgctcaatctttatcaggtcgcgagaggttttagcgagggaagctataaaccactcttttaaggcgctaaagacgcggcttttaattgaagaaggagctcatgctcctgcttatattgctctttacaggcctatcatctaccagggttcggaatggaaagagaaagcanaaaacttggaaatggtacttcaacaa

SEQ ID NO: 50060 - DNA, 341 bp, Gossypium hirsutum
  Clone ID: LIB3197-015-P1-M1-E6
gaacaactttcacttccttttgatgccattgggtgcgtgcatttgtttaagaggtcttgtaatggtctggtgccatgatttcatgaagaagttataatctgaatttatttataattatatatatgtatactttttaagaatagataaggtttctgattgtgttaaatttgaaatatggcctctgttatagaccaaaaggataaaagaaatgatctgtcaaagactaagagagttgcctgccagtgttatttgagaaatgtcaattttttttttttttcgctaataaggcgctaaagaaacggcatttaattgaagaaagagctcatgctactgcttatatt

SEQ ID NO: 50061 - DNA, 244 bp, Gossypium hirsutum
  Clone ID: LIB3197-015-P1-M1-F10
cttagggagacattccgggtgtctgttcttgttctcaaatttgtgtttcaaagaaaataagacaaatttccatgtgcagtggtccgaagaggaagccaactcaaacttgtttaacgatggagggtgagtctcgtaaagaagatgaggttcctcaaaagttctcggttttgctggagttgtcggcttcaaaatgatttgattggctttaaaattgctgttgaagaagggggtcatgatatggatg

SEQ ID NO: 50062 - DNA, 391 bp, Gossypium hirsutum
  unsure (1)..(391): unsure at all n locations; Clone ID: LIB3197-015-P1-M1-F11
ttacaagggccagacggggagaccaaatgttaatcttttnaaactgatacaattgggtcttactttctctgatgccaaagggaatttgcctacttgaggaactgataaatactgtgttagtcaattcaatttccgcaaattccatcctaatgaggatgtctattctaattactccattgagcttttgtctcaaaatggcattcattttcataagaacaaacaaaaggtcattacttctcatgacttcactgaattggcaatgatatctgggattggctccaatgataatgcgcattggtcgactatccataccgacttctatttttagtatttccttaagttgctcacttgcaataattcttctgaacacagacaggtttctttaatttga

SEQ ID NO: 50063 - DNA, 287 bp, Gossypium hirsutum
  Clone ID: LIB3197-015-P1-M1-F12
gtgcatacttgtggatgcagggaagaatgttgctgatgaaactgagagttaaggagccagtctggtctttgtctgttggctcttcggcttacaagtagtggtggtgtggcccaattctcctccctagcttcattttaagtcgagagctggcattgaccctttaagaaataagcagtttggtttcttaattggtgctatggttggcttggccttatttgcgcatgccatgttccccaaactaaaggtgtgttttttttttatgccaaaaaaattattaatttcatttt

SEQ ID NO: 50064 - DNA, 350 bp, Gossypium hirsutum
  Clone ID: LIB3197-015-P1-M1-F2
ctcactgtctctatatttctcctcagatctctctgtttttctttcacccaaataaagcattccctcttttttctctccatttctctctcatttttcctcttgccaaacaggtttaaaaaaacaagaaaatgcattctatttgctttcaagctactggagttcctagatcgaattacattttcgattcttgttctcctgctttagctatatccaagccgatcaatctccgtttctgcggacttagaaaggaagccttcggtttctctggtttgactcactcgagttctggccgagttcgtttctcgagtcgtggacattctaagaaagtctctgcttccgctgaaagcaac

SEQ ID NO: 50065 - DNA, 393 bp, Gossypium hirsutum
  Clone ID: LIB3197-015-P1-M1-F3
tttcatttccgtattatatatacacttggaagggataaaataacagagctttgcttcgtctagaccgatcgaaagggtattcagtgatggccactgaaatcatgaataatgaagttggtgtggaaaaaaatgaggagtcggaggcttcaaatggcattgagaaattagagatttcgaatggcactgatgaggtctccgaaaactcttcatctatgcaaaaagatgaagatggggtgacagaagttgccaaaaagaaaaagaagaaaaataaaagcaaaaaaaagaaagagcccttgaagcagactgatcctccatctattcccgttgttgagctttttccgtccagggagtttcctgagggtgaaattcaacagtacaaggatgataaattgt

SEQ ID NO: 50066 - DNA, 138 bp, Gossypium hirsutum
  Clone ID: LIB3197-015-P1-M1-F4
cccacgcgtccgggattttaacttgaatttgccgcctgaaagcagtggccaaaaagactctcacattgcggatatgaatgctgattttgttactgagctttgtagctctggtgcaagccccgtgccagtgaagcacat

SEQ ID NO: 50067 - DNA, 462 bp, Gossypium hirsutum
  Clone ID: LIB3197-015-P1-M1-F5
aaactatggaacagcctcttctctcagaagagaaaagaagtgaaattgatgagaacgagaggctgagctcgtatcagtatgttggcagaacagggtcggtgattccaactgcttcgttggcgggtatggatgttagcatcgaagagattcgatcagccacttctttttctactccttacccgccatccattcatgctcctttgatcagctcccctgagccccttcctaatgagccagctattcctaaccaaagtccttacgcagcagattatggcccatactccaatgactttcagaggcaattattggatgaggtagagataagagagttgctcattgatcatatcggtcatcgatgttgttgggggagtcgccctgctcgtacctggaagattcatgctgttgaggattgcaatgtttatgtgggaactcttgaaactttcttagaagaaagggaagtga

SEQ ID NO: 50068 - DNA, 439 bp, Gossypium hirsutum
  Clone ID: LIB3197-015-P1-M1-F6
ctcagaacagctcaaaaaagcttccaacattttgaagaaacaaagaatcaaacatgtcgaaggaagtgagtgaagaagggatgagccgaaaggactatgtggatcctccaccggcaccgctcatcgacgtggctgagatcaagctttggtctttttacagagctctcatcgccgaattcatcgctactctccttttcctatacgtcaccatagccaccgtcatcggccacaagaaacaacacgatgcatgcgatggtgttggtcttttgggtattgcttgggcttttggtggcatgattttcattcttgtttactgcaccgccggtatctcaggtggtcacattaacccggcggtgacatttgggttgtttttggctaggaaggtgtcgcttataagggcggtggcttacatggtagctcaatgtttgggtgctatttg

SEQ ID NO: 50069 - DNA, 278 bp, Gossypium hirsutum
  unsure (1)..(278): unsure at all n locations; Clone ID: LIB3197-015-P1-M1-F7
tcgcccacgcgtncgattgagacctcgggataccattcacatgatgcaacctggtcacagtccagagaaccagaggcaaatggtggtacctgagctccaactgcacattcaagagaacagccagggaattgctgccttcaatgggttgacttctgcttaccctaatcaatcaaccccatcacctgttcagtcatatccaggtcaaccccagaagtcccatgggctgaacaactctcttcagggttctaatgggtcacagcagcaagcatatgccatgc

SEQ ID NO: 50070 - DNA, 309 bp, Gossypium hirsutum
  Clone ID: LIB3197-015-P1-M1-F8
cacctctcttactatcattaacggtctcctgctacgccgtcacgattgcagcttcagatcacttctattccaaagctagccgctcatactgcaaaatgggcaaggaaaacactcacattaacatcggcgacatgggccatgtctactctagaaagtcaaccaccactggccacttgatctacaagcttgtacgtatcgacaagcgtatcattgaaagggttgagaaggaagctgctgatatgaacaagaggtcatacaactatgcatgaccgcttgacaagtagaaggctgagcgtgaacgaggtatta

SEQ ID NO: 50071 - DNA, 417 bp, Gossypium hirsutum
  unsure (1)..(417): unsure at all n locations; Clone ID: LIB3197-015-P1-M1-F9
tcggtttcaaagcttcactttctcagcngctgtgtgtttttttgttcacacgcctcaagtctcttttctccatcaatctgaagtagaagatgggaacattgggtaaagcaatctacaccgttggattctggatccgagaaaccggccaagctctcgatcgccttggttgccgcctccagggcaactactacttccaagagcaactgtcgaggcatcggacgctgatgaacgtattcgacaaagctccttttgttgatagggatgccttcgtggcacctagcgcttctgtcatcggtgatgttcaggtcggacgaggttcttctatatggtatggatgtgttttgagaggtgatgttaacagcatcagcatcgggtcttgaacaaatattcangataacttccttggtcattgtccaa

SEQ ID NO: 50072 - DNA, 266 bp, Gossypium hirsutum
  Clone ID: LIB3197-015-P1-M1-G1
ggtttttctactgtggggaaatctacgcttcttaacaagttgacaggaacattttcagaggttgcttcctatgaatttactacattgacttgtatcccaggtgtgatcatgtatagaggggctaaaatccagttgttggatcttccgggtattatcgagggtgctaaagatggcaagggtagaaggagacaggttatcagcactgccaggacatgtaattgtatattaattgttcttgatgcaataaaaccaataactcacaagcg

SEQ ID NO: 50073 - DNA, 431 bp, Gossypium hirsutum
  Clone ID: LIB3197-015-P1-M1-G10
atcacacttgagcttagtgctcaaagctcccccgactatttcttcggcttcccaattgttactgcaacaacactcaaagccaatggcttcctctctcaatagcgccgcctctttgcgtctcttcgcttcttcatcttcttcctgttcctccgccgccgctagactttctctccgttccacttccctttctttctcttcttctctcaaatccctcgctttctctactctttctcgccacaagaggggatcggctgtcagtgtgtcgagtaccggagggtttagctctgtagccagtccgaaatgcgcttgcttagatcctgatcagttgaagagtgctagagaagatatcaaggagcttctcaaatccaaattctgccatcctattctggttcgtctaaggtggcacgatgctggtacctacaacaagaaca

SEQ ID NO: 50074 - DNA, 458 bp, Gossypium hirsutum
  Clone ID: LIB3197-015-P1-M1-G11
caaacatgaagctcgtgaggtttttaatgaagttaaataacgagactgtctccatcgagctcaagaacggaactgttgtccatggcaccatcacaggggttgatgttagcatgaatacacatttgaagacggtgaaactaacgctcaagggaaaaaaccccgttactcttgaccatctgagtgtccggggtaacaccattcgttattatattctccctgacagcttgaatctggaaactttgcttgtggaggagacaccaagagttaagcctaagaagccagctgcaggacggcctttgggacgtggtcggggtagggggcgtggacgtggtcgtggcagaggtcactaattggctctctgcaattttccttcattgggtaccttactattttagtgtgctcgagcagaatttaagggagcgaagttttgagtatacagtaaagaatctgtctattta

SEQ ID NO: 50075 - DNA, 422 bp, Gossypium hirsutum
  Clone ID: LIB3197-015-P1-M1-G12
aaaaataaattacgcatattattataaaaaaggacatcagcataaaggggggggaaataaactggagcgggggcagcactactcatatcgaaacctgctctctctatccgaacacttcatttcagaccattgcggattgctttgacaattttgccaaaaagattttctatgatgaaaaagcagtgagcaagccacatgactgcaagcaacactgacatctttgtgcccactgctaaaccagaagcattggctatcacacctatttgcacatgagaaacatctcaccctatttgatattctaaacaataattcaatggcttcttattgttgaactggtaagagactatacgttactagtgatttgtggacaaactatctattatgtaatgcggacatatattattagttacattatgtttaaa

SEQ ID NO: 50076 - DNA, 365 bp, Gossypium hirsutum
  Clone ID: LIB3197-015-P1-M1-G2
cccacgcgtacgcaaaacctgtgaaagaaacaagcggaagcaaagcagagactgagacaaagaatcacataccaacagctgcatcctaagccaatggcgtcaacaattcttaggcgagcaacctcatccgttatcaagtcaagtcttctaacggaagcgtcaaggagaagctatgcctctgttgctgtggggactgacatcctgtctgccgcatcccaagttagtctccagaaagctcgaagctgggatgaaggcgttacctccaatttctccactacttctgtcaatgatatcttcaagggcaagaaagttgtcatcttttgactacctggagcatacacaggttgttgttcacaacagcatgt

SEQ ID NO: 50077 - DNA, 425 bp, Gossypium hirsutum
  Clone ID: LIB3197-015-P1-M1-G7
cgttaactttgcttctgaagatccagagaatgacatgatcaaaccagcgactcaaggagtggtgaacgttttgaaagcttgtgccaaagcaaaaacagttaaacgagtcgtcttgacatcatctgccgcagctgtgtctatcaacacactggatgggacagatctcgtcatgacagagaaagactggaccgatatcgagttcttatcatcagcaaagccaccaacttgggggtaccctgcatccaagacgttggctgaaaaggcagcttggaaatttgctgaagaaaacaacattgatctcattacagttatcccttctctcatgactggtccttcccttaccccaattgtccccagcagcataggccttgctacatctttgatttcaggcaatgaattccttataaatgctttgaaaggaatgc

SEQ ID NO: 50078 - DNA, 274 bp, Gossypium hirsutum
  unsure (1)..(274): unsure at all n locations; Clone ID: LIB3197-015-P1-M1-G9
gcaaactgggggtgctttgcttcatnnatccggtttntgattccttggacaaagtggattaatgaagcaaagcacactgggggtgctgatctcgaacctaacgccggaacgtctaaaccgattcaccaaggcgaccacccaaccaagatagaacatgctatgatagcgtcacatgaacatagtgatgacgtgtgtgaacatgttgaaaacccaaagtggatctccttcaaagcagtactgatgctcctagtaggcaccttgattgcagttgcat

SEQ ID NO: 50079 - DNA, 332 bp, Gossypium hirsutum
  Clone ID: LIB3197-015-P1-M1-H1
cccacgcgtccgcggacgcgtggggtgctggaagaacatgaacaacttggttctatcccttgctcctaaatttaccaaattgctaactctcgtactacgccaagaaaatccgcagcttgaggacactgctgttgagactattgcgaaattctgtcatgatctgcaggatctggacctcagcaaaagtttcaagcttggtgatcgctcattttatgctttggcccatggttgccctaatcttacaaaacttaacatcagtggctgcacatcattcagtgatgaaggtcttgaatattttgactaaatttgtcgaaaactaaaaatattaaatc

SEQ ID NO: 50080 - DNA, 432 bp, Gossypium hirsutum
  Clone ID: LIB3197-015-P1-M1-H10
tcgctcacgcgtccgcccacgcgtccgccgcttcgtgcacgattctgaaattttgcctgccgctccatctctacatcacaggaatggcgacagatgttgcagcccccgccaccgccgcacccaaagacccaacccaacctaaccttgaagtaaaacttttaaaccgttgaagcttcaaggaagtcaaggtggctgatatctcctggagagatacacatgggtgtccaaccttaaaagcatgctacctatgtgccacacactgctgggaggtactcagttaagcgtttcaggaaggctcagtgcccaattgttgaaaggcttacaaactcacttatgatgcatggccgacacaatgggaagaagcttatggcagtcaggattgtgaagcatgccatggatattatttatctcttgactgatcagaacccaatt

SEQ ID NO: 50081 - DNA, 352 bp, Gossypium hirsutum
  Clone ID: LIB3197-015-P1-M1-H11
ccgttgaaaaaatatgggtttccaaagaaacatattgggtttccttttcttgatattggcttcactaacaagcctctcttctagccttcctagtgaatactccatagtggaacatgagattgacgcatttctttcggaggaaagggtgttggagatcttccaacagtggaaagaaaagcatcggaaagtgtaccggcacgccgaggaggctgagaaaaggtttgaaaatttcaaggggaatttgaagtatatcctagagaggaatgcaaagagaaaagcaaacaaatgggaacatcatgtgggattgaacaagtttgctgatatgagcaatgaggagttcagaaaagcttac

SEQ ID NO: 50082 - DNA, 329 bp, Gossypium hirsutum
  unsure (1)..(329): unsure at all n locations; Clone ID: LIB3197-015-P1-M1-H3
gggtccacccacgcctgcttttttgctcaaaaaagcgggcaacattcngccgggacagttaatcaaacgtggggcacgatgtgacttaccaatggttgatccgtaaggactataaggatcctccaccggcaccgctcattgacaaggctgacatcaagcttaggtctttttacagaggtctgatcgccgaattcatcgctactatccttttcctatacgtcaccatagccaccgtcatcggtcacaagaaacaacacgatgcatgccatggtgtctgtcttattggtattgcttggctcttggtgcatgattacattcttgttactgca

SEQ ID NO: 50083 - DNA, 419 bp, Gossypium hirsutum
  Clone ID: LIB3197-015-P1-M1-H4
gctgacttctccccttaggcatgttaatgatgccagtgagaaacccaacatgatggataaatccaatgtccctctgctgcgcccgcaagatcttaggctagctatcatggcttcagaaagattgttgattctgcagccacataattgggcgctgaggagggaccatggcatgatgctgtattataatagggaatatggaaaggcagtgcaagagctgagcatttgcatggcctttgcgccggaagaagaggcagagattcttgaaccatttgttgagaaattgcatttgatgcggctggagtcatcatggaagtctttgggacacacaggtcgactcactgtgccttgaattttgtacataaccttctgtccatctgaaatcctccttgtattaagggatgaattctgcgattgtgatc

SEQ ID NO: 50084 - DNA, 394 bp, Gossypium hirsutum
  unsure (1)..(394): unsure at all n locations; Clone ID: LIB3197-015-P1-M1-H5
cagtattttctcattacacatttggcagatctttcgttgtgccgtcctttcgctggcctaagtgagctctcattnntcctctttgtcaagacaccganntttccaaatcttctcttctccttcccaatcgcttgtcttggtggtcttggcattctttcttcaacacacattacacttctttcttgtgtagtcgataattccagatcggtacccttcttaaactcgtaacttgcttcttttgtaagttcatgtgctaccccatcccaaatctaaacactttcttgaactgacattcttcaaatactctgcttaatgtttttatgtcatgtatatataagcataaaattattgatcctcatttgctgtttggacccgtctgataatactgagagca

SEQ ID NO: 50085 - DNA, 190 bp, Gossypium hirsutum
  Clone ID: LIB3197-015-P1-M1-H6
tttcctttgcttgatagtggcttcactaacaagcctctcttctagccttcctagtgaatactccatagtggaacatgagattgacgcatttctttcggaggaaagggtgttggagatcttccaacagtggaaagaaaagcatcggaaagtgtaccggcacgccgaggaggctgagaaaaggtttgaaaat

SEQ ID NO: 50086 - DNA, 335 bp, Gossypium hirsutum
  unsure (1)..(335): unsure at all n locations; Clone ID: LIB3197-015-P1-M1-H8
gtatagctcaaaaaagcttgcaacattcngaagaaacaaagaatcaaacatgtggaacgaagtgagtgaagaaaggatgagccgaaaggactatgtggatcctccaccggcaccgatcattgacgtggctgacatcaagctttggtctttttacagagctctcatcgccgaattcatcgctactctccttttcctatacgtcaccatagccaccgtcatcggtcacaagaaacaacacgatgcatgcgatggtgtcggtcttattggtatggctagggctgtggtggcatgattacattcttgttactgcaccgcggtatctcggtggtcacatt

SEQ ID NO: 50087 - DNA, 307 bp, Gossypium hirsutum
  Clone ID: LIB3197-015-P1-M1-H9
gctggattccggtgacggtgtttctcacaccgtgccaatctatgaaggatatgcccttccacatgccatcctccgtcttgaccttgcaggtcgtgatctaaccgatgccttgatgaagattcttaccgagagaggttacatgttcaccaccactgctgaacgggaaattgtccgtgacatgaaggagaagcttgcttatgttgccctggactatgagcaggaactggagactgccaagagcagctcatctgttgagaagaactatgagttgcctgacggacaagtcattactattggagctgagaga

SEQ ID NO: 50088 - DNA, 247 bp, Gossypium hirsutum
  Clone ID: LIB3197-016-P1-M1-A1
gtctacaacacacttgctagtattcctacttggagtggtgactctcaccacttcccacatttggtacctatgagtcaccaaattatgggaaaccccctactcctgtattcaagcctcccaaggtgaaaccaccaccatatgaacctaagccaccagtgtatgaaccaccaaaaaaggagaagcctgaacctaagccaccggtttatgcacctccaaagaaagagaagcatggacccaaaccaccaat

SEQ ID NO: 50089 - DNA, 454 bp, Gossypium hirsutum
  unsure (1)..(454): unsure at all n locations; Clone ID: LIB3197-016-P1-M1-A10
gctggttaaaccttagccgaagctgtagaactctcgcatcgctccctcttcgccataaaaaatctttaaaaactttcaagttaaaactgaaataccaaaactaaaactaaatctaaattagcttgtaagtaatttgtttcttgaaagttaggggagagaaatgttgtcgacaccgtacgagtccgaagcgacggagcagcacgacgatacctccgcatcaaccatgaaattcggaactcccgaggcagtcgactacgtccgatccctcaccgacgtgggggccatgacgcgcctccttcacgagtgcatcgcctaccaacgcgccctcgatgtggacctagacaccctnctcttccagcgcaccgacctcgacaagagcctaaacaacctccaaagatctgccgacgttctcgacattgtcaaggctgaatctgaccacatgctctctaacgtt

SEQ ID NO: 50090 - DNA, 355 bp, Gossypium hirsutum
  Clone ID: LIB3197-016-P1-M1-A11
gttatctctgagggtgtcttaataaacgccttcgatttactttcggtttccatttacttctttatttctacgtttttgaatttttagtaagcgaaaatgagagagtgcatttcagttcacatcggtcaggctggtatccaagtcggaaatgcctgctgggagctttactgccttgaacatggaatccagcctgatggccagatgccaagtgacaagactgtcggaggaggtgatgatgcttttaacacctttttcagtgaaactggtgctggaaagcacgtccctcgtgctgtctttgtggatcttgagcctactgttattgatgaagtgaggactggtacttaccgtcagcttt

SEQ ID NO: 50091 - DNA, 462 bp, Gossypium hirsutum
  Clone ID: LIB3197-016-P1-M1-A12
cttctttcttttctttcttgttcttctttagtcggtaaaattgtcaaaaagcatggctctttctggggttaaaaatgatagaggggaattgaggattcttgagaatttggatgagctaaggactgatttagctgactatattgctgagttatcagaagctgcagtgaaggagagaggtgtgtttgccatagcactgtctggtggttctctcattggcttaatggggaaactgtgtgaagcaccttataacaagactgtagactgggctaaatggtacatattttgggcagatgaacgcgttgttgcgaaaaaccactcagacagcaattataagcttgcaaaggatggcattctttccaaggtgccgattgttcccagccatgttcattctatcaatgattcggtttcagcagaggaggctgctgacgaatacatgtttgttattcggcagctagttaaaac

SEQ ID NO: 50092 - DNA, 430 bp, Gossypium hirsutum
  Clone ID: LIB3197-016-P1-M1-A2
actaaagcaatatatgctcatttgtttgcagggagcggtttccaatcttgcttacgcatcttgagtgtgtttgcagattgtcaaactttcttagtgactatgcacattaatgttcacagcatttattagagtgtgagttcctcccatgcctttgcttttcttcttttaacctacttcataattgcaaattctctagttttgctccaatattgcactcatctaactgtatgtgtgtatatatatgcatgtagctatgtatttatgcttatgatatctgctaatatagctattaatgggatttttagaaaaaaatctattcttgaaagataatactatttacacatcatgttcaaattatggtaaaaaagtatggattagatattatataaatcttaaaatatatatttatatccaatactcctactcaaat

SEQ ID NO: 50093 - DNA, 406 bp, Gossypium hirsutum
  Clone ID: LIB3197-016-P1-M1-A3
gtttccttttacatccaaataccctttgcctttgaagtttgaagctttcaaactgttggcaatgttgaatcttttttttttttttcaaaatatttgacagccaacatccatgaattattgtctttcttcatcaatttctttcctttttgtaaaggttgatcctttttattctactcaattacataaatttctaccctttccttttaaagattttattttgtcctttttgttgacctttacttatctccctttgttcatgtaaaaagggtttttttttctttttgggtgtgtttatttgttgaagtttcaaacaatacccttttctttctatatatgaattaagtctttttttggttcatttcttcttcctttctgtcgataccctttctttatagtatctcccaat

SEQ ID NO: 50094 - DNA, 325 bp, Gossypium hirsutum
  Clone ID: LIB3197-016-P1-M1-A4
tttctatttcctaactcccaaatttctcattatgagagcgagactctctttaccgcggggtgaatctaatcattttctcttttttatcttataccaaaattattacctttcttttatatatataaataagctctctttttcaaacttttttctttctattttactacttataaatatatcctattaaattcccaactattttcctttaaaaaacatttttaatttactttttttttcactaaactctatcttacaattttttccacacctttttttcacttacttctaaaattgtatacttttcctcttaataacatttttttta

SEQ ID NO: 50095 - DNA, 437 bp, Gossypium hirsutum
  Clone ID: LIB3197-016-P1-M1-A5
gccatttctgtattccactgctctgctcactcagcctttgaacaacactcctctagctctctgttctatccctctctatacacatggcaaaggtgaagatcggtatcaacggattcggtaggatcggtaggttggtggctcgagttgctttaaaaagagacgatgttgaactcgtcgctgttaacgatccttttatcactactgattacatgacatatatgttcaagtacgacagtgttcacgggcaatggaagcatcatgaactcaaagtcaaggattcgaagacccttctgtttggcgagaagccagtcactgttttcggtattaggaacccagaggagattccatggggcgagaccggagctgaatacattgttgaatcaactggagtgttcactgacaaaaacaaggcagctgcccactttaaggggggggct

SEQ ID NO: 50096 - DNA, 412 bp, Gossypium hirsutum
  Clone ID: LIB3197-016-P1-M1-A6
cccacgcgtacgggaaaatattatcttgtggattcaggatatccacaaatggtagggtttctacgtccatatagggggaacgatatcatttacctgattttcgtcgaggtaatcatcaagtatctggaaaaaaaaatctttaatcatgcccattattcgctacgctctgtgattgaacgaacatttggagtgtggaaaaaaaatgaccaatattaaaggatattccaagttatttattcaacaagcaagttctaatagttattgcaacaatggttttgcataattacattcgaagacatgattggtcagatgatgatgattttcaaaaagtggagaatatacccgacatgccagtctctttaagctagtttgacagaggtgaatcgagttcttgtacatagaaagtgacctt

SEQ ID NO: 50097 - DNA, 373 bp, Gossypium hirsutum
  Clone ID: LIB3197-016-P1-M1-A7
acggacgcgtgggcggtctccctagccggcgaagtgaatcgacaaacggccgaacttgagtggatcgtggcagcaaggccactctgccgccaattgtttgagctagctagctcttactcaaatggcaaccaaaacgatgacgttgcaaatatttccacttttcttctttttgttcagtgtctgcaactccattttccttggtgctaatggagatgacaatggtggttggcaaactgaccatgccaccttctacagtggtgctgatgctaccggcacaatggggggagcttgtggttatggaaacctgtacagtcaatggtatggaacgagcacagcacctcttagcactgcacttttcaacaatggcttgagc

SEQ ID NO: 50098 - DNA, 338 bp, Gossypium hirsutum
  Clone ID: LIB3197-016-P1-M1-A8
tcggtcaaccctttgtacatttcttttctcacttggactctttgcctcacatgcggttggcctccccactgctgccgacggccggtggcagctgctacaaaaaagcattggcatctcatccatgcacatgcaactccttaaaaatgaccgtgttgttatgtatgataggactgatttcggcccatccactctgccattggcaagtgggaaatgccacaatgacccatccaacactgctgtccaagtagattgtacggcgcattcagttgagtatgatgttttgagcaacaagtgcagggctcttactgtccaaagcaacgtttggtgttctttatgcg

SEQ ID NO: 50099 - DNA, 431 bp, Gossypium hirsutum
  Clone ID: LIB3197-016-P1-M1-A9
agaaagaaagcgcccggggccgtccggctcgcattccgacccaccctaccttctcttcgctttcgagccaacaacctcttggggagataaacccaatatcggtcgggactttcctcaccatctgaaacctacaaacgactataatgagagaacaaacactttagaacaaacctccaccatttacaaaacaaaaataaaatgaccttaaatccgctggttccaaaccaaacggtcattcaatgccgccatcctcacatattcatgcactccattaactcaactcccacaaatctttcttcttaagccttccaccaccagcttatgagacgcttcattcaccaaccgaggcacagcacgaatctccttccacaactagtcctctaaagcacatcatactcgcaaagattaaagccctctcacaagccatttct

SEQ ID NO: 50100 - DNA, 397 bp, Gossypium hirsutum
  Clone ID: LIB3197-016-P1-M1-B1
cggacgcgtgggtcttgagccaacaaccagctgtgcttcaataaacccaatatcagccaatactttcctcaccgtctgaaacctgaaacgagtataatgagagaacaaatactttgaacgaacctccaccattttcaaagcaaaaatgaaatgaccttagatccgctggttccaaaccaaacggtcattcaatgccgccatcctcacagattcaggcactccattaactcaactcccgcaaatctttcttcttcggccttccagcaccaggttgtgagacgcttcattaaccaatcgaggcacagcaagaatctccttccacaactagtcgtcgaaagcacatcatactcgcaaagattaaagccctttcacaagccattgcttttggcacaaacgc

SEQ ID NO: 50101 - DNA, 279 bp, Gossypium hirsutum
  Clone ID: LIB3197-016-P1-M1-B11
gaaacatcccggaagtttgttagaaggttttacacaaactcaaataagcactctagcagggaaagacaattttatggttgcaggaggcttccaaggagagcttacttttaagcacttggacagaaaaggagtaaccttttgtacccggacaacgtatgacgataatgcaattacaaatgctattgagatatatgacagcttgaggggtggaattaattttatggcctcaaacaatgactgtagtgtgagagaatatgatactgagagatttcaactttt

SEQ ID NO: 50102 - DNA, 363 bp, Gossypium hirsutum
  Clone ID: LIB3197-016-P1-M1-B12
gatcacttgtccaatttttaccttcaatggtgtggatgggatggtcgacagattagcaggggacgttaaacatgtcatacaccaccacccaattgttcagaaaatttcttttgttgatcattcatcgtgaggacttatatcaagatatgccattgcacgactttttgaacaatatcttactcaagaaaattctcaaacaaacggacacagtatagctgatcaattgtaagattcatggcttgaagggatcttcaaatgtcaaatgtgctggactagagcccgtcaatttcataacacttgcaagtccacaccttgtgtctccatcgcattagcaggttccactgtttcttggctcccattttc

SEQ ID NO: 50103 - DNA, 165 bp, Gossypium hirsutum
  Clone ID: LIB3197-016-P1-M1-B2
ctgactcgtggggcaaaatatggtcaaaaatgggtgcgaacaatgacaatcatcgagtagcttttcacccaagtggaatgagcagtatacatgggaggtttttgatccttgtactgtcataactattggggtgtttgataattgtcatttacatggaggagataa

SEQ ID NO: 50104 - DNA, 459 bp, Gossypium hirsutum
  Clone ID: LIB3197-016-P1-M1-B4
aaaaaaaagaaaaaaacccttagagaaaatgaaaaactgatattctccgaaaattgtctatttatgtagaaaaatataaggaaaataaaagtaaaaattttgcaactggactgaaaggatatgtcgtcgaaggggaagggaaaggagaaggaggtggtttatgggaaacggaaggtcagcgccggaagaagcggtggtggagcggaggagaaccgtcggaagcggaagaatcggggagttcttcagttctttgaagacgctgctgatgttgatgacaatgaagccagcgatgacagcgattttgatgattattttatggaagaagaaccagatcttaatgcaaataataatccttggaaaacccataaccttccatttgtccccaaggaagaggtgatcgaggaggagtttgataaaatgatggaggagaggtacaaggatggtgctaggtttatgtca

SEQ ID NO: 50105 - DNA, 412 bp, Gossypium hirsutum
  Clone ID: LIB3197-016-P1-M1-B5
tcttgtttcattttcattcactaacgaacatgaagaggactttcatgcacgaaaacccaagggacatatagaaagaaagcgttggtggttgtttaatacgttattgccgaaacaaaagcctagggacagattcttcaacaaatcaattaccaaatggaagaatattcaaaaggaaccctagaggtagaggactcccagaatgaacaagtgcatgaagaagaaaacaaggaagaatttggtgtagttaatggtggggaagatgattccaattcaagtagtagcagttcggacaaggaggataattcagaggagaaactggtttctgagtcagttggggtttctttgacggaagataccgagccatcagttgagaatatgggagactctgatgttgctgaattggtgataaaga

SEQ ID NO: 50106 - DNA, 411 bp, Gossypium hirsutum
  Clone ID: LIB3197-016-P1-M1-B6
ccacgctcgctctctcgaacaagccaagaaatcgtttcccaatacgtatttgctggttgggtgttgcaatgacgaaacaacacacaagtacaagggcaaaactgttatgaccgaatcagaacgttatgaatcccttcgccattgcaagtgggttgatgaagtcattcctgatgctccgtgggtgatcgatcaagaatttctggataaacacaatattgactatgtggctcatgattcacttccctatgctgatgccagtggagctgcgaacgatgtgtacgaatttgttaaagctgctgggaagttcaaggaaacaaaacgaactgatgggatttttacgtcagatatcataatgagaattgttaaagattataaccaatatgtgctgcgtaacttggaccgtgggtattc

SEQ ID NO: 50107 - DNA, 166 bp, Gossypium hirsutum
  Clone ID: LIB3197-016-P1-M1-B7
tatttattccacccatccccaaaaatctgtgagtgtcttttccacattatatagtgccaaaccatttctcccctacccagattatatttatcttgcccccaatttccccaaattggcaaccctctacatctcctcaaagggttgtagcagaaggaagtctcgaact

SEQ ID NO: 50108 - DNA, 449 bp, Gossypium hirsutum
  Clone ID: LIB3197-016-P1-M1-C10
aacagcttcaaatttgttctcctcttgtttcctgctatagaatagaagtgaagtgaaggagaaagcttcagagaactaaatagcactggaaaatggaggagaagatttcgatgtctttgaagaatcatgattttcgtttctttatttcgtcttgattgctctttttgtttgttattttgatttggaaaaagaaaaagaaaaagtaaagagttaaaagcaatggagtctcgaatggatcattacgagatcatggaacagatcggccgtggtgctttcggcgctgccattctcgttcaccacaaatccgagaataagaagtatgtactgaagaagatcagattggcgcggcaaacggagcgttgcaggagatcggcacatcaagaaatggcacttatatcacgggtccagcatccttacaattgtgaatttaaagaagcttgggttgagaa

SEQ ID NO: 50109 - DNA, 431 bp, Gossypium hirsutum
  unsure (1)..(431): unsure at all n locations; Clone ID: LIB3197-016-P1-M1-C12
gtttattttcttcttgttttgaaatttcctctctttgggtcttcttctccttagactcgggtagtctggctcgcttaccgcatcatacctagtttgatcttcagcgtactcaggaactcccatttccaggtatgtntcttctcctctttttaacgtttctgttgcaagaatgtgtgcaaggccccccgtttttctgggtgtatgttgaaatctaatattactaagatcatttttttcctcttgtattttttcccccgattttcttataattattttcttttctctgtgttttattttgtttatttatcatgttttttttttttatatttaactgttttctattattattttttttaagttctttctgcaatttttttcgcaacttttcttccttcctttttactccaattttttctcctagtttttttttt

SEQ ID NO: 50110 - DNA, 483 bp, Gossypium hirsutum
  unsure (1)..(483): unsure at all n locations; Clone ID: LIB3197-016-P1-M1-C4
atggcccgggcggcgggcgcaggcccctgcggcggcggcggcgggatgtttgtgcaggaggagaagatcttcgcgggcaaggtgctgcggctgcacatctgcgcgtccgacggcgccgagtggctggaggaggccaccgaggacacctcggtggagaagctcaaggagcgctgcctcaagcactgtgctcatgggagcttagaagatcccaaaagtataacccatcataaattaatccacgctgcctcagagagggtgctgagtgatgccaggaccatcctggaagagaacatccaggaccaagacgtcctattattgataaaaaagcgtgctccatcaccacttcccaagatggctgaggtctcagcagaagaaaagaaaaaacaagaccagaaagctccagataaagaggccatactccgggccaccgncaacctgcccttctacaacatggaccgggccgcggtccataccaacatgaga

SEQ ID NO: 50111 - DNA, 404 bp, Gossypium hirsutum
  Clone ID: LIB3197-016-P1-M1-C5
aacttatggtcgtcctttggaaccctccgatgagacttgctacccttccgctacaccctccgatggcgactttgattacgcacgtcccgatttctcttccggttacgcgcacttagcttatgccgacgaagccctcgaaactgaatacagtagctatcttaaacccaagccccgacctggacgattcgaacctgcacctgcttttggtgactatggaaggaaacctgaatatgagcaattcgaatctggtcatggacgcaaaccggagttcggacgacccggctccgaatttgaatctgattttggccgaagacctgaattcgagcagcctcctgaggagtttggatctgggcatggccggaggccggcatatgagcattcacatcaaccggatttcggatccc

SEQ ID NO: 50112 - DNA, 441 bp, Gossypium hirsutum
  unsure (1)..(441): unsure at all n locations; Clone ID: LIB3197-016-P1-M1-C6
cggaagagctttcctttttttctctctatattggctcatctccttttccaccgccgtcgatctcgatccttatccccgttttcaaaaaagctccaaaaagatggccaatgctgcatcgggaatggctgtgcatgatgattgcaagttgaagttcttggaacttaaggcaaaaagaacccaccgctttattgttttcaaaatcgaggagaagcagaagcaagttattgtggagaagcttggtgagccaaccgagagctatgaggattttactaaatgtcttcccgctgatgaatgtcgttatgctgtgtacgattntgattttctaacggccgagaacgtcccaaagagcagaatctttttcattgcatggtctcccgatacatcaaggattcaggagcaaatgatatacgctagctccaaagacagattcaagcgagaact

SEQ ID NO: 50113 - DNA, 404 bp, Gossypium hirsutum
  unsure (1)..(404): unsure at all n locations; Clone ID: LIB3197-016-P1-M1-D10
ctgatcaagagactgcttctcatatgagcacgattaaagaattatctgaccagcatacgaaggcctcagaacttcgagcagaagccgaatcacgaattgtggaagcagaagctcaattacacgaagctattgagaaatactcaaagaaagaatcagaatccaacaatctgattgaaaagttgaatgcgcttgaagtccaaattaaaacatacgaagaacaagctcatgaagcatccacaattgctgtatcccgacaagtagaggttgaagagactctttccaaattaaagcagcttgaaaggcttgtcgaggaactgcaaaccaagtcggcacactntgaaaaggagagtggaggaactgctgaggcatatttaagcttactcangaactagccgaatacgagt

SEQ ID NO: 50114 - DNA, 376 bp, Gossypium hirsutum
  unsure (1)..(376): unsure at all n locations; Clone ID: LIB3197-016-P1-M1-D11
ctcctttcgaagctcttgaaaggatcccatccatttcgaagctttcaatgtcactgtagagatacttgcttaggtgacaacagccagaaatattccaaattttcaggaacaaaacaagaaaatgggtatcttacaagctcatctgggcataggagtgcaaatgagcaacttcctgcaagtgtgagctttgtgaagctggctgacctgaatgaagaggaatggaacttcttcttggagaagttccaggagttgctgaagccggcattcaataaacgaaaatctgttacagtaggtcaaaagcagatgcagaggcttggtacatcgtgccagttntgagattgaggggataccaaaagaggcaagttgagttgagtga

SEQ ID NO: 50115 - DNA, 297 bp, Gossypium hirsutum
  Clone ID: LIB3197-016-P1-M1-D12
ctggaaaagatcaagaagtatgccactgttgctagggttttggcccacactcagattaagaaaatgaatggattgaagcacaagaaagcacaccttatggagatccaagtttatggtggaactattgcatacaatgttgattttgcatacaagttctttgagaagcaagtcccgattgatgctgttttccataaagatgaaatgattgatatcatcggtgtcactaagggtaaaggttatgaaggtgttgggactcattggggtgtcacacgtctgacccgtaagacccacagaggt

SEQ ID NO: 50116 - DNA, 218 bp, Gossypium hirsutum
  Clone ID: LIB3197-016-P1-M1-D4
tcccacccgccggtgtttgttgttctgaggaaccgacgcactagggaggagtccaatgtggcggaggagccggaggcctaagtactctacaccgagtgcatctagcggaacgggtaggtggggctgtatgtcatggccatagtgttcattaccctcctgattggattccacgccctgcgtgcttacctagataagctgacctccctctctgaccgtta

SEQ ID NO: 50117 - DNA, 195 bp, Gossypium hirsutum
  Clone ID: LIB3197-016-P1-M1-D6
gctctttctttctatagaattagtcactcctgttctagatgaaagttctctccccaattggtgcttgcctaacgcttgcttgggtgggaaaccatgctgctctttcacctgagcaatattggagctattagctggcaaatacttcaatgccaaaggctgtaaagaaattctacatccagaactgatggaggagaa

SEQ ID NO: 50118 - DNA, 328 bp, Gossypium hirsutum
  Clone ID: LIB3197-016-P1-M1-E10
gaaagctgcgcacgcgggcacgtaccggaactccattgtcgtcccaaacctccctttttattcttcgtcttctgaaaaaatttctttgaaagggcagcttttgactacaatgggaggaaagtgaaagggaggtaaggggctcggaaagggaggagccaagaggcatatgaaggtcttaagggacaacattcatggcattaccaatcttgcaattcgccgtctggctcgtaggggaggtgtgaaaagaattatgcggtttaatttatcaataaacccgttgcgtattgattaaattttttttataacaaaatttcgttgatgccgtgac

SEQ ID NO: 50119 - DNA, 398 bp, Gossypium hirsutum
  unsure (1)..(398): unsure at all n locations; Clone ID: LIB3197-016-P1-M1-E5
ttattattcttcgtcttctgaaaaattttctttgaaagtgcagcttttgactacaatgtgaggaaggggaaagggaggtaaggggctcggaaagggaggagccaagaggcataggaaggtcttaagggacaacattcatggcattaccaagcctgcgattcgccgtctggctcgtangggaggtgtgaaaagaatcagcggtttgatctacgaagaaacccgaggcgtattgaagatcttcttgtagaacgtgattcgtgatgccgtgacatacactgaacacgccaaaaggaagaccgttcccgtcatggatgtttgttaatgccttgaaaaaggcaaggcaggactctctatggttttggagggtaagcttaatacaactattgatttttaggcat

SEQ ID NO: 50120 - DNA, 275 bp, Gossypium hirsutum
  Clone ID: LIB3197-016-P1-M1-E6
gttccttatcggaagtcttatccggctataccggacagtcattatgatatttcgaacccgaaagcagttattgaagagttggataggattgaggagtttctcaattgggtcagctacattttccctgatggaagcttgtatgaaggcacggtttgggatgatttggctcatggcaaaggtgtttatgttgcagaacaggggctggtcaggtatgaatgttaatggttgcaaaacaatatggaaggtcatggggttgttgatgtcgttacatctgt

SEQ ID NO: 50121 - DNA, 114 bp, Gossypium hirsutum
  Clone ID: LIB3197-016-P1-M1-F10
cggacgcgtgggaaataagggaaatttagggtggtatttgaattaggggaaaatggcgatgaggaaagtttacagcgagatataagggatgaaattgaaagaagttcctggcta

SEQ ID NO: 50122 - DNA, 450 bp, Gossypium hirsutum
  Clone ID: LIB3197-016-P1-M1-F11
ataacaaattaattcatcggccgaccgtttgtgtcggggcggagacgtttcatatgtcatgttcaccagatctcaactcttccttcgccgggtttatttgttcttccttgttttttggctgttttcaataaatttcttctatttttccatggctgctccacctgcaagagctcgagccgattacgactatctcataaagctccttttgatcggcgacagcggtgtgggtaagaagtgccttcttttgcgtttttcggatggctcatttactacaagttttatcacaaccattggaatcgactttaagattaggactttagagcttgttggaaaaagaatcatactgcaaatttgggattctgttgggcatgagcgggttcgactattacaactgcttactaccgtggagccatgggcattttgctcggctatgatgtgactgttgaggca

SEQ ID NO: 50123 - DNA, 98 bp, Gossypium hirsutum
  Clone ID: LIB3197-016-P1-M1-F12
tcgatatacaatataattctacggccgaccgtttgtgtcgggccggatacgttccatagggcatgttccctgatcgtcaactcttccttccgcgggtt

SEQ ID NO: 50124 - DNA, 283 bp, Gossypium hirsutum
  Clone ID: LIB3197-016-P1-M1-F4
ctttcttaccaaaactctactctatgtctatcggggtgtgctttttgccctgttctggatgcaaatccatgctatatagtacttcaacaaattcccaagagttaacatcaatgagaaagagacaacaaccagagagcatatgctcgagaccttctttccccataccaccctatagccataagatcatgagccaaggttcattcctgaaacccaaaatggttatggcctttacagccacttttcaagctcaagcccgcctcatttcaccaccaaaaaaacctat

SEQ ID NO: 50125 - DNA, 459 bp, Gossypium hirsutum
  unsure (1)..(459): unsure at all n locations; Clone ID: LIB3197-016-P1-M1-F6
agaacaaaaaaattcaacggccgaccgtttgtgtcgttccggagacgtttcatatctcatttcaccagatctcaactcttccttcgccgggtttatttgttcttccttgttttttggctgttttcaataaatttcttctatttttccatggctgctccacctgcaagagctcgagccgattacgactatctcataaagctccttttgatcggcgacagcggtgtgggtaagagttgccttcttttgcgtttttcggatggctcatttactacaagttttatcacaaccattggaatcgactttaagattaggactatagagcttgatggaaaaagaatcaaactgcaaatttgggatactgctgggcaagagcggtttcggactattacaactgcttactaccgtggagccatgggcattntgctcgtctatgatgtgactgatgagtcatctttcaat

SEQ ID NO: 50126 - DNA, 397 bp, Gossypium hirsutum
  Clone ID: LIB3197-016-P1-M1-G10
cggacgcgtgggcggcgagcgaaccgggaaaagcccagcttgagaatcggtcggcatcggcgtccgaattgtagtctggagaagcgtcctcagcgacggaccgggcccaagtcccctggaaaggggcgccggagagggtgagagccccgtcgtgcccggaccctgtcgcaccaagaggcgctgtctacgagtcgggttgtttgggaatgcagccctaatcgggcggtaaattccgtccaaggctaaatacgggcgagagaccgatagcgaacaagtaccgcgagggaaagatgaaaaggactttgaaaagagagtcaaagagtgcttgaaattgtcgggagggaagcggatggaggccggcgatgcgcccccgtctgatgtggaacggcgagagccg

SEQ ID NO: 50127 - DNA, 323 bp, Gossypium hirsutum
  Clone ID: LIB3197-016-P1-M1-G12
caaaaatggatggttattgtagcagaagggtaatcatgtttttggtgtttgcatgtgcagcaataagcagagggtatggacaagaatcaaccactcttgttcctgcaatcatcacctttggtgactctgtggtagatgtgggcaataatgactatctccctaccatcttcaaggctaactatcctccttatggacgggactttgccaacaaaaagcctactgggaggttttgcaatggaaaattagccactgacatcactgctgaaactctggggtttacaacttatccaccagcttaccttagcccagaagcatcagggaag

SEQ ID NO: 50128 - DNA, 264 bp, Gossypium hirsutum
  Clone ID: LIB3197-016-P1-M1-G4
gcaactttttggacttagtgaattccctgatgctgaggatctgctcaaaccagcggccgcagccatgatggattaatcagcggatgttcgcaaagcagcacatagatgcgtcactgaaattttaagagttagcgcgcaagaagcaattgataagaatcttagagatttacaagggccagctttagctcttatccctgagcgggtaaaaccttataggtcttttcaagaattagatgaaccatcaaaaggtggttctattggact

SEQ ID NO: 50129 - DNA, 251 bp, Gossypium hirsutum
  Clone ID: LIB3197-016-P1-M1-G5
tcctccatgttcgactcaaccctcccgtcctatttctcttgggccgatagcgaaccgggaaaaggccatcttgagaatcggtcgtgatctccatccgaatcgtattctagacaaactttctcagcgactgacccgacccatgttccctgctaaggggcgcaccacagcgtgagagcccattcgttcccggaccctgttgcaccaagaggcgctgtctacaattcctgttgtttgggaatgcagccctaatc

SEQ ID NO: 50130 - DNA, 169 bp, Gossypium hirsutum
  Clone ID: LIB3197-016-P1-M1-G6
tttgaatttcgttcgacagctcgtccatcgcgagctggggtaggtaatcgggtgggaaggcctgaaccgtgacgcggcggctgacagcaacgttagggagttcgttgacgtctgatgaggcctcgtgaagagttatcttttctgtttaacggcctgcccacccttgaaa

SEQ ID NO: 50131 - DNA, 259 bp, Gossypium hirsutum
  unsure (1)..(259): unsure at all n locations; Clone ID: LIB3197-016-P1-M1-H12
ctatattttataccagtccctacttttgccaacgcaggagatcatttggagagatgcgtgaggtccctcanaaaacctaccattattatcacccatagtcaaaggatctatattttgcagcaatgattgatgacattaagaatgctccaaatggttcattctttctacttcatgcatttgctcataaccccactggcgtgaatccttcattaaatcagatttttataaatttcacaccacatcaatgcgaaaggtcatt

SEQ ID NO: 50132 - DNA, 421 bp, Gossypium hirsutum
  unsure (1)..(421): unsure at all n locations; Clone ID: LIB3197-016-P1-M1-H5
gctatgcaagccgttgtcaaagactgtgaggttcaatgttttgaaagtgattcctgctggatcttctggtggagggaagaaagctttcactggaatgtgaggtgtaagtgttttcaatcaggagaagacattaaaatccctgaactgcctctagatatgaagaacctgngactattagatgtttttatgtttttgtttttcctttcctattacttgttatgtttggatttgtctagttatgacaactggaantttgaaggtatcccctattctagtatgatcctgttctcttgagaatcactctgatcacttacttagattatgtatgaaaattctggtgttctctaaaaaaaaaataattttnataatacaaaaacatcttttttttttcttatattatttttgctccccctttttaatt

SEQ ID NO: 50133 - DNA, 390 bp, Gossypium hirsutum
  Clone ID: LIB3197-016-P1-M1-H6
catatctatataccagtccctacttgggccaacgcccgcaacatttggagagatgcgcaggtccctcataaaacctaccattattatcacccagagtcaaagggtctagattttgcagcaatgatagatgacattaagaatgctccaaatggttcattctttctacttcatgcatgtgctcataaccccactggcgtggatccttcagaggagcagtggagagaaatctcacaccacatcaaggcgaaaggtcattttgccttctttgacatggcgtatcaaggctttgctagcggtgacccacagaaagatgcaaacgccatcaggattttttttgaggatggtcatcacatatgaattgcacaatcatatgcaaaaaacatgtgactc

SEQ ID NO: 50134 - DNA, 411 bp, Gossypium hirsutum
  Clone ID: LIB3197-016-P1-M1-H9
gtgagaaggatctttctttctttattctgcacatcttaaccttaaccacatcataagatagagatcttttaaacggtccaattattgaaaactggctttcaacaacaaagaaaaacaattcccaacttattaactttacccctttgcttcttttcttggtttcctgctctactttcacttttactgaaacttattatgcgcttgatccaactggaaatatcactatcaaatgggacctaataagttggaccccacatggctatgttgctgttgttacaatgtacaatttccaacagtatcgccatattcaggcacctggttggacattggggtggacatgggccaaaaaggaagtaatctggagcatgatgggaggccaaaccacggaacaaggggattgttcaaaataca

SEQ ID NO: 50135 - DNA, 419 bp, Gossypium hirsutum
  Clone ID: LIB3197-017-P1-M1-A10
gagaacatttgggtgagggttttagagagagaaagagaaggccggagtgaaagacaagacacagagagagagacagagagagagatgtcgggaggaatagcgcgtggtcgactcgccgaggaacgtaaggcatggaggaagaaccatccccatggttttgttgcgaaaccagagacgttgcctgatggaacggtcaatttgatggtgtggcattgcacgatccctggtaaagcaggaactgattgggagggtggctacttcccgctcacgctccatttcagtgaagattatcccagcaagcctccaaagtgtaaatttccccagggctttttccacccaaatgtttatccatctggtactgtttgcctttcaatcctaaatgaggatagtggttggagaccagccataactgtgaagca

SEQ ID NO: 50136 - DNA, 455 bp, Gossypium hirsutum
  unsure (1)..(455): unsure at all n locations; Clone ID: LIB3197-017-P1-M1-A12
atctcaacgaccgcctggcctcctacctggacaaggtgcgtgctctggaggaggccaacgccgacctggaggtgaagatccgtgactggtaccagaggcagcggcccgctgagatcaaagactacagtccctacttcaagaccattgaggacctgaggaacaagattctcacggccacagtggacaatgccaacgtccttctgcagattgacaatgcccgtctggccgcggatgacttccgcaccaagtatgagacagagctgaacctgcgcatgagtgtggaggccgacatcaatggcctgcgcagggtgctggatgaactgaccctggccagagctgacctggagatgcagattgagagcctgaaggaggagctggcctacctgaaaaagaaccacgaggaggagatgaatgccctgagaggncanngtggtggagatgtcaacgtggagatg

SEQ ID NO: 50137 - DNA, 429 bp, Gossypium hirsutum
  unsure (1)..(429): unsure at all n locations; Clone ID: LIB3197-017-P1-M1-A5
ccgcaatgtgtaatgaacgtaaatgagttgcgaatataaatatatggaccgttggatatacatacttggggcacatcgatccaactaaaggaatgagcttggtcaatgttcatggctgccattttgatcacataaaacaattcagaaactgaagcattatccttgaggtatcatgttggggctcacatagattgactaatctgttatctgtatattttgtaggcgatggattntgtctagctctaaattagaacatttgcctacaagttcaatcattttttgattttaaactctgaattattgttgatttagactagaatatttgactttgtgaaattgaattttggacttttgaaacttgattgaaatttgggctaatttgctaaaaaaaaataaaataagttggtggatttgtcaccatttaagttt

SEQ ID NO: 50138 - DNA, 186 bp, Gossypium hirsutum
  Clone ID: LIB3197-017-P1-M1-B10
tcggacactgccatcgaaaaaggtggttgcctgtgaagggctacaactgtggtgtggctattttcccaacactttttaacttgctgtttttagggtgcccctttcatcttaagatcattgctttactcgtctgggacttgttgaggtttgaaacttacggcactgtaaatttaccgcattcatgtc

SEQ ID NO: 50139 - DNA, 434 bp, Gossypium hirsutum
  Clone ID: LIB3197-017-P1-M1-B11
tcggtttttatttaggccgacgcacatggagaataataatagctccgacgaaaggccgacggtgatggtgacgaacgacgacggaattgacgccccaggactccgagctctagttcgcgtcctaatctcctccaatctatttcgcgtccttgtttgcgctcccgtttcggagcaatcagctgttagtcatagtatcacatggcgtaaccttgttcttgtaaagcaaggtaaattaattgaacccattgtttttgttgttttcgaaccccaactctgtggacctctttgggtatatctaaaaaaacatactctcttgtgcctgagctcggcataacaggcataaacatgggcagcaactgtggttatcatgttgtctactctggcacggatgctggtgctcgagaagcctcttcaatggcatacctgctgtttct

SEQ ID NO: 50140 - DNA, 383 bp, Gossypium hirsutum
  unsure (1)..(383): unsure at all n locations; Clone ID: LIB3197-017-P1-M1-B4
gatttccctatcgacaaatctcttgccaaacactttccagtgcaacgggaaccacaatcatcgttcgacgcgcctctttcccaaccaaccattgagtttcggtctcaaacaccgtagaaacgagaacaaactcttcacgccacggaatccgccggtgctctccgccgtctccggctctaccggactggaatcttctgcagtgagtgaagatactgttgatttgttggatacggtcacagtgtttgatttgaacggcaatggaatccccatctctgatttgtggaaagatcggaaagctgttgtagcatttgctcgccattttggatgtgtcttttgccgcaaacgggctgattatcttgcctncaagaaggatgtaatggata

SEQ ID NO: 50141 - DNA, 412 bp, Gossypium hirsutum
  unsure (1)..(412): unsure at all n locations; Clone ID: LIB3197-017-P1-M1-B5
cggacgcgtgggctctctctaaaccagtaacagtgaaaccttctcttgagtcccgacaaatggcagaggaggcgcacggtaaccccgccgccgaaaaagaagccaagggagcggcggcggagatggacgatatcgagtcacgaattaccaccgccatgcgctctcgcgttggccacttcaaggaacaatccgactcattgactttcgagggagttcggagattgttagagaaagacttggggctagaaacgtttgcactggatgttcacaagagatttgtcaagcaatgcctgttaaagtggttagatgatggcaatgacaatgaaggctctagtggaacggtggagaaaaatgtaagtacaaccactgaaggaacagaatctnncaaaggacgacaacctaagaaagaaat

SEQ ID NO: 50142 - DNA, 391 bp, Gossypium hirsutum
  Clone ID: LIB3197-017-P1-M1-B6
gtctccgaggctgatatctttgtcaccaccactggtaacaaggacatcatcatggttaaccacatgaggaagatgaagaacaatgccattgtttgcaacatcggtcacttcgacaatgaaattgacatgctcggtctcgagaattatcctggtgtcaagcgcattaccatcaagcctcaaaccgataggtgggtcttccctgaaaccaacaccggcatcattgtgttggctgaaggacgtctcatgaacttgggttgtgctactggccaccctagctttgtcatgtcatgctctttcaccaaccaggtgatcgcccagctcgagctgtggaaggagaaggcaaccggcaagtacgagaagaagtgtacgttttgcctaagcaccttgatga

SEQ ID NO: 50143 - DNA, 442 bp, Gossypium hirsutum
  Clone ID: LIB3197-017-P1-M1-E10
taccaaaccctagctcttttccacccaaaatcccaaacccacccctcttcccactgggtgcttccattcatgtcgtcgattgcttcccttcacgctgctttcttcatcatctccatcaatagcttgcttcactttcacttagtggctagttattttctttttcaaagttaaagttttaaccgtaaagttctggtgattgtttgcttttccttaattgaacatgtcatcattaaggaatgctatcagcagacgtgctcacaaggaacgagctcaaccgtcatcgaggaaaaatattgggtttcttgagaaacaaggattatgtcgtccgtacgaaagcattccacaagaaggaagaaacgttacggacaagtttatttgtttagtgcattcaattcttgctggttatattaatatatgtgctcactaatttcttcctcttttt

SEQ ID NO: 50144 - DNA, 434 bp, Gossypium hirsutum
  Clone ID: LIB3197-017-P1-M1-E11
tcggatgaccttggctctgttaatcgccacttgagatcttcaaacaggaagaaaatggggttcattatggaatttgcagagaatctggtgttgaggttaatggaggacccaaaagagagggatagaaaattcagagaacacgtttacactatgaaggatcgatgcgcaaaaaccaaggagatgtggagttatccactgcggccttatgggttttggacatttgagcgccacaatgctcagctccgttgggatcctcagattagccaagtccccggccgcagggatccttatgatgaccttcttcaagacagttatgcgtcctccaccaaacgaaactgaggaatcagaagccattagcagatggtttggagcttgatcttacaaatgggaaagtggacattgaaaactttttttacttgtggtttgaattaaaa

SEQ ID NO: 50145 - DNA, 255 bp, Gossypium hirsutum
  Clone ID: LIB3197-017-P1-M1-E12
tcggtttcagaagaaaaggaaagttctaaggccagcgatgaatgtaagaagtggccctggtttccgttttatagtcctagtccagctcactacttgttctccaagaagtctccggcgagatctttggccaattccactccgaaacggttttttagggagccgttccctccgccttctccggccaagcatattatggcagttcttgctcgacggcacgggtctgtgatgccgaatgagtccgccatacctgaagga

SEQ ID NO: 50146 - DNA, 343 bp, Gossypium hirsutum
  Clone ID: LIB3197-017-P1-M1-E5
ctatagcagcagcagcagcagcagcagcagaagcaaggggtttatagacgaaatggcagcgaaaaggaagactcccgtcaagaccagaaacccagatctgatccgtggtgtgggaaagtattccaggtctaagatgtaccacaagcgtggcctttgggcaatcaaggccaaaaatggcggtgctttcccccgccatgatcccaaacctaaggcccccgctgccgctgagaaacctcccaagttttacccggctgaagatgtcaagaagccgcttcttaacaagcgcaaacctaaacccaccaaactcaaagcaagcattacaccagggactgtgttgattttg

SEQ ID NO: 50147 - DNA, 395 bp, Gossypium hirsutum
  Clone ID: LIB3197-017-P1-M1-F10
gaaagaaagaaaacatgtctcttgtgacagaagagataaaagcgagtgcatcagagatttaccatggagatgagatatgccaagagaaatccaagtttttgttggaggaagtaggcatgccaagggggcttttgccacttagagacatcgaagaatgtgggtacgtgaaggacacaggtttcgtgtggctcaaacaaaagaagagcatcacccacaagttcgaaaagatagggaagctggtttcctatgcaactgaagtcacggctgtcgttgagaaaggcaagatcaagaagctgactggggtgaagaccaaagagcttctggtttggatcacactgagtgatatccaagtggatgatcctcccactgggaagatcactttcaagaccccttca

SEQ ID NO: 50148 - DNA, 369 bp, Gossypium hirsutum
  Clone ID: LIB3197-017-P1-M1-F12
cggacgcgtgggtggcaacgagtgatgccggagtgaaagttttgggcacatgggcgagtccattcgtgatgagggtaaggattgccatgaacatcaagtctgtggcctatgaatttcatcaagagaggttatgggaaggcaaaagcgagcttctcctcaaatcaaacccagttcacagaaaggtccctgtcctcattcatggtgatgacaccatctgtgagtctctcattattgtccaatacatcgatgaggtttggccttctgctcccattcttccttctgatccccatgaacgtgccaccgcccgtttttgggctgcttatcttgacgacaagtggttcccttccttgagagctattggtatggctg

SEQ ID NO: 50149 - DNA, 403 bp, Gossypium hirsutum
  Clone ID: LIB3197-017-P1-M1-F4
ccgttttgttcctttggatctgtgaggcagccgccggttcctttgaccaccaccaccgccacctctctgtgatcaaccttcactctctttttcaaggaaattaactgaaatggctggaggattaatccaccaggttttaaggaggaaatttcaatcacagtctgctgttcaagctttatcatggttttcatcaaggaaagttaatgacgatgcgggttctgctggtatgaggactgttgcactccttggagctggtgtttcaggtttactaggttttgcaacagtagcatctgctgatgaggcagaacacggtttaggagttgcaaattatccttggcctcacgcaggcatcctcagttcatatgaccatgcttcgattcgtcgcggtcaccaggtttaccag

SEQ ID NO: 50150 - DNA, 290 bp, Gossypium hirsutum
  Clone ID: LIB3197-017-P1-M1-F5
accctcgctttcttttattttactgaatttctttaaaaacttcgcggttatataactttgctgcagtgatttacttcttctataatttatacctaaatgatctctagtattcttttatttattcaacgatcccttctcacccatgctaaatataatccttatctcatccttattaccaacgcctacagtcattttaatcacgaacattggaaactcattatccaccagttccaaaatgaaacaacagcttcactctttttacatgaccaataattcgtattctcaatttt

SEQ ID NO: 50151 - DNA, 219 bp, Gossypium hirsutum
  Clone ID: LIB3197-017-P1-M1-F6
ctttccctactttctctcacttcaaggaacgactttagtctcatttccttaggcttcaagtgattgaatcagatctccagcagtgacacttttctgtgtttgccaagaaatggcaggctggggtggtctgtcttgagatctatcagttaaagagctgttttttggagcatttttagaggattcggaattctgggttttttagaataggtccgataaaat

SEQ ID NO: 50152 - DNA, 276 bp, Gossypium hirsutum
  unsure (1)..(276): unsure at all n locations; Clone ID: LIB3197-017-P1-M1-G10
gggtgatggaagaaacaaaggataaaaagaatgctgtagaggcctatgtttatgacatgaggaataagctttgtgataaataccatgattttgtcactacttcggataaggaagagttaatggctaagcttcaggagacagaggattggttatccgaagatggggaggatgaaactaaaggtgtttatattgccaaccttgaaaagcttaagaagcaaggtgatcctattgaagaacgttacaaagagtattccgagaggngaactatcattgatc

SEQ ID NO: 50153 - DNA, 408 bp, Gossypium hirsutum
  unsure (1)..(408): unsure at all n locations; Clone ID: LIB3197-017-P1-M1-G12
catttttctgtagcaccccccaaaaagcttgtgcttggatatggctgaaaacccagtaaaatggctgtttctcattctagcaagctgcctgtgtttcgctttcgtcctgtcggaaagcaactcattaataaagaagacctacatcgtccaaatgcacaagtctgcaatgccagcatcattctccagtcctctggaatggtactcatcgaaattaaagtcggtaatgtccgatacccagagtgaaggtgaaggagatggtgaaaataggatcatctatagctaccaaaatgcttttcatggtgttgccgctcagttaactgaagaagaagctgagaggctaaaacaagaagatggtgtagttgctatacttncagagaccaatatgaatacacaccacaagagtctatg

SEQ ID NO: 50154 - DNA, 404 bp, Gossypium hirsutum
  unsure (1)..(404): unsure at all n locations; Clone ID: LIB3197-017-P1-M1-G4
gaaggatgccatggctgcactcaaccaanaagttatgcggctaggccagtcactttacagcaacctggtgccggaggcagcagtgcaggacctgcagctggtggtgaaaccgggccttcagattcatcaaacaagggtcctgaaggggatgtaattgatgcagatttcactgacagcaagtgaaaaagctcggttttgaatcattctgggtattggtgtgaaaggtgggggattgcattacctgtcatttttgatccatggtggtgaaagaaaacaaatggatttaggatttaatagagtatgaagcagcatatatatatatagaatgtccaaatagtaattaatatagggtgttaagcccttcacttgaacattgttttgaattgttcaatatgcatgccatt

SEQ ID NO: 50155 - DNA, 399 bp, Gossypium hirsutum
  Clone ID: LIB3197-017-P1-M1-G5
gttatccacacgtccttttgctgttggttttcgttaagcttgcgttactccgtcggatgggcaagtttcagggcggagctcaacatcgaggaaatctcacgacacaacatccatccagtaacttgttttggttactggagacaatggacttctggttcaagggaatcagtgaggacacatctgcgtactcatttaatgagacagacattcataaatgtccatttcttaagaacattaacaaacccaccaacttttcattctcttcaatgagttttcccatgcctgtacagggagctagaggttctttatttgaggatggttcaaatttttatctggcattttaagcttttatcattgaaggattgcattgtaccttttttagggtggtttgattttccc

SEQ ID NO: 50156 - DNA, 413 bp, Gossypium hirsutum
  unsure (1)..(413): unsure at all n locations; Clone ID: LIB3197-017-P1-M1-G6
ggaccacttcttcccttccattttactttgttttagttgccataacgtcaccttccaatacaacccacaatgaggcaacaatatgtcttcactactctcacgttgctcatcctgttttccctcagttgttcaacaacattagcccaagctccggcactggctccagcaccttctggtccgacaaacgtcaccaagatcctcgaaaaagccggtcaattcaccctcttcattcgtcttctaaagtccactcaagtggccaaccagctgctcggtcagctcaacaattccaacaatggtatgaccgtttttgcaccaacggacaatgctttctccagccttaaaatcggcacattgaattcactcaccgatgaacaaaaagtggagctggtgcaattncacatcgttccaacata

SEQ ID NO: 50157 - DNA, 207 bp, Gossypium hirsutum
  Clone ID: LIB3197-017-P1-M1-H10
ctttgaacttccgcttcgccgattccacactggtactctcaacctcaagagcctgactcaaacataaaagaatcaaatcggatctatttattttaaaagcatacctttttttctttgaaatattaataataaattggtttctcaaatatttgattgaaatggagttgttagatggaaacttaaagctcaaagagattcaaaagcttc

SEQ ID NO: 50158 - DNA, 371 bp, Gossypium hirsutum
  unsure (1)..(371): unsure at all n locations; Clone ID: LIB3197-017-P1-M1-H11
gaggtttgagaatgtacattgcagcaaccataaagagatatcgtgcagttaaggagagttgggaagattaaaatgagcattggtgttattgcatactatcaattagttcaagtttgtcaggccgagtatttccgtcagttgctaaaaccagttacgtagtctagtagttagcaactcttggaaattgggatctgggggagtcttccatttggttgttttatacatagggctttcaaagaatgaaatatctgatattgttgatgggaaattggggatagacagctcttgtcttgttttgatggcaatccactagttttagtctgtagtctttccgtaattatagctataaacctccntccaacttaaaaata

SEQ ID NO: 50159 - DNA, 329 bp, Gossypium hirsutum
  Clone ID: LIB3197-017-P1-M1-H4
cggacgcgtgggcgcagtttatgcagacccgacgcttacaatcaacagcttgaaggagagaatttcactcaggtcagctgtcgttccctttttctcatgaatccaactcgctgcattcgctgattattagagaaaaaaaacccaatcttttgatagtaacaataaataaaagtaggagaagctgcctcctccatggcttcagctccttccaagctctatgcacatgatgttagccttgtggtagttttgctggaactaacccattttctggagctcctcctcactctctttttctcagtttctctcccatgttcttgcggttttgaatg

SEQ ID NO: 50160 - DNA, 202 bp, Gossypium hirsutum
  Clone ID: LIB3197-017-P1-M1-H5
agcagcttgagtttatcgaccccctcttggaatctccttaatgctagtcctcctgatcagccgaatacaagagttgggcttggtatgagaggagtaattagtgatgcgtttccatctaccttaagaagagcaaatccaggaaaccaacaaggacctttaccccatagtttatcatcaactggggttgccgggcattctagtt

SEQ ID NO: 50161 - DNA, 267 bp, Gossypium hirsutum
  unsure (1)..(267): unsure at all n locations; Clone ID: LIB3197-019-Q1-M1-A1
ctgatttttcttggttagcatatgtctcaaaggcctaacgttccccactcttcttcaatagcttttggtctccattctcatctcctggtttccagtgagatgaaccctaattccaactggtcttaatagntccatctctttctttttcttctattgattttttggttaaacttcttttatttcctttttgaaacaaagtaattgccttgttgatttgcaagcaaattttggtaaagttcttaagtatttgagtttagatcttctttg

SEQ ID NO: 50162 - DNA, 419 bp, Gossypium hirsutum
  Clone ID: LIB3197-019-Q1-M1-A10
cggacgcgtgggccgttgaaaaaatatgggtttccaaagaaacatattgggtttccttttcttgatattggcttcactaacaagcctctcttctagccttcctagggaatactccatagtggaacatgagattgacgcatttctttcggaggaaagggtgttggagatcttccaacagtggaaagaaaagaatcagaaagtgtaccggcacgccgaggaggctgagaaaaggtttgaaaatttcaaggggaatttgaagtatatcctatagaggaatgcaatgagaaaagcaaacaaatgggaacaccatgtgggattgaacaagtttgctgatatgagcaatgaggagttcagaaaagcctacttgtcaaaggtgaaaaagcccatcaacaaagggataaccctgtcaaggaacatga

SEQ ID NO: 50163 - DNA, 408 bp, Gossypium hirsutum
  Clone ID: LIB3197-019-Q1-M1-A11
cggacgcgtgggttccaaagaaacatattgggtttccttttcttgatattggcttcactaacaagcctctcttctagccttcctagtgaatactccatagtggaacatgagattgacgcatttctttcggaggaaagggtgttggagatcttccaacagtggaaagaaaagaatcagaaagtgtaccggcacgccgaggaggctgagaaaaggtttgaaaatttcaaggggaatttgaagtatatcctagagaggaatgcaatgagaaaagcaaacaaatgggaacaccatgtgggattgaacaagtttgctgatatgagcaatgaggagttcagaaaagcttacttgtcaaaggtgaaaaagcccatcaacaaagggataaccctgtcaaggaacatgaggagaaag

SEQ ID NO: 50164 - DNA, 417 bp, Gossypium hirsutum
  Clone ID: LIB3197-019-Q1-M1-A12
cccacgcgtccgtgttgtcgacgccatggctgctcttcctttcatcttcttcttatctttctttataatttccacaacattgacgtcagccggcgccgccgccgccaccatcaaactctccctctctcccttccctcacccttcttcctcccatccttaccaaattctcaacaacttagtcacttcttctgttgcaagagcccaccacctcaaacaccccaaagccaaggccgataatactacctcttctcttctcagggcttccctatttcctcacagttatgggggctacactatctccctcaaatttggaactccgcctcaaacccttcctttcattatggacactgggagcagcctctcctggttcccttgcacctctcgttacctttgttcccaatgcgctttccccaatgt

SEQ ID NO: 50165 - DNA, 374 bp, Gossypium hirsutum
  Clone ID: LIB3197-019-Q1-M1-A2
acgcatgcataatttcttccggtgatctttgatagagattagctttttaatttttcattatgggaaagatcaagatcggaatcaatggatttggaaggatcgggcgtttggttgccaaagttgctctccaaagcgatgatattgagctcgttgctgttaacgatcctttcatcaccactgaatacatgacgtacatgtttaagtacgacagtgttcacggtcaatggaagcatcatgagcttaaggtgaaggactcaaagacccttctctttggtgaaaagcctgtcacagttttcggtatcagaaaccctgaggaaatcccatgggctgaggctggagctgagtatggtgttgagtctactggtgttttactg

SEQ ID NO: 50166 - DNA, 351 bp, Gossypium hirsutum
  Clone ID: LIB3197-019-Q1-M1-A3
gttcaatattttctggtcaacaggaaggcattgcactaagaaggacttttgctgctcttaataattataaagtggatggtaacaaggaaatgatggctatcgggctgatgaacatggatggctcctccacttcttgctacattacaactggcgccttttctcgatcaagcgttaatcacaatgctagagcgaaaagggcagtgactaacatattaatggctactacgggtatggagacccttgtctttctcatgcctttattccagtacaccccaaacgtggtgttgagagctatcattgtgtcaactgttgataggcttatatacattccagcagcctgtccaatttgga

SEQ ID NO: 50167 - DNA, 393 bp, Gossypium hirsutum
  Clone ID: LIB3197-019-Q1-M1-A4
cttcgagatacttaaacaaaatggccgtgaaaccaacagtagctttgagggcttttcttgtaggaggggtagctgtttttgcaaaagtagcaggtgcaatgaaggctgctggtggtgctaaactgggtgcagccgcggctgctatgactgtagcggctttttgctgcaatgacaggatcaaaacaggagcaaaaagatgggtctaagcaacctccaaaatgatcttccttttctttcattctttctttcagcaccttgtaggcatttgtaatgtaggtgaagtagtcagttgctcatgggagcttgtctagagaagatgactatgtttggaattctattttggtcatcacggagtttttatttttaaatgacttgaaataagaaaaacctaca

SEQ ID NO: 50168 - DNA, 347 bp, Gossypium hirsutum
  Clone ID: LIB3197-019-Q1-M1-A5
caaaaaaaaggaagaaagggctccttttttctctgctagggtttcgaaaccctagcttttgcgccgccatcgcctgcccaccgctcttccaccatggacagtggtcggagtttggcaaatcaaggcctttagcccttgtttcagccccacttgaaagctaagtatacttagcccacgattggaagaggaaagctttcccctcgtcccctttcgattttgtttttgaagacggagagaactccgacgacgtaaccgtgaggcgattcaggtaacgtcagagtaggtgagcaaaagcgatgggacgggcgtctgttcgggcgcaaaatgcgctgacaccatgtagggga

SEQ ID NO: 50169 - DNA, 428 bp, Gossypium hirsutum
  Clone ID: LIB3197-019-Q1-M1-A6
aaagctttggcaagttcctggaaacttccttatggaattacattccccgggaaacctgctggccgtttctctgatggtcgtgttttgactgatttcatcgctgggtacttggcgattaagacaccagtgccctacagatacaggaaagaactggggggtcgtctcaagtatgggttgaactttgcttatggaggaaccggtgttttcgacacgccagctcctgagccaaacatgacaacccagatcgatttcttgcaacagcttctcaatgactcggtctaccccaagagggccttgaaaacttctgttgcgcttgtcagtcttgcaggcaatgactactctaattacattgccaccaacggctctactgcgggatttccagtcttcattggaaggggtgtgaaccaaatgaaggtgaacttgaaacg

SEQ ID NO: 50170 - DNA, 373 bp, Gossypium hirsutum
  Clone ID: LIB3197-019-Q1-M1-A7
atccccttgtctttcgaaatatggcctcgctctctcttttatcctcactttctcagccatcaaagacaccctttttttcttaagggtgtaaaagatggcagatggtgaggatattcagccacttgtttgcgacaatggaactggaatggtgaaggccggatttgccggtgacgatgctccgagagccgtgttccctagcattgttggccggcctcgtcacaccggtgtgatggttggtatgggccaaaaagatgcatatgttggtgatgaggctcaatctaaaagaggtattttgacattgaaataccctattgagcacggtattgtgaacaattgggatgatatggaaaagatttggcatcatacattttac

SEQ ID NO: 50171 - DNA, 392 bp, Gossypium hirsutum
  Clone ID: LIB3197-019-Q1-M1-A8
gtcaaacaaagctgaaaacaagctctaacccacactgtagtctcttcttcctttcatctaaccccccatttttctttctcattttttcagaagaaatggcaaatgaaaagaaaacccaaactggggtttggccaaaaatcaaaccttttgttaatggtggtacctctggtatgttagccacatgtgtcattcaacccattgatatgatcaaggtgaggattcaattgggtcagggatcagctgctactgtcaccaagaccatgcttagaaatgagggtattggtgccttttacaaggggctatcagctggattgctccggcaagctacatacactactgcccgactcggatcattcaaaatgttgacaaccaaagcaatcgaagccaacgat

SEQ ID NO: 50172 - DNA, 406 bp, Gossypium hirsutum
  Clone ID: LIB3197-019-Q1-M1-B1
gcgaaaaacacacacgctatagtaggaagagagttttcgggggagagaaaccctaagttttctctggcgtttctggtttttgtgatttttgaaattcgctgcttcaacggagactcatttcaggtatcaatctcttttttagtttcagctccatgctttttcacttgtatttcagtgggttttttcttagtgtttttggttttcagctttagaaatcactgtttcattccgtctttcaaatctacagatgtcggtcttgctcttcatttttgtttgtttatcgtctagtacacgttcttctttatttttggattgattgtttccctctgtttaatattataacttttgggttattttctatttcttctaaatctttgcttagcacaatactaattgcctaaacaaa

SEQ ID NO: 50173 - DNA, 396 bp, Gossypium hirsutum
  Clone ID: LIB3197-019-Q1-M1-B10
gcaactggaataaaaattcttataaatagatatccaatcaaaatttacatggtatactcaaatacttatgtagatacaacataactttttctcttgcacccaagtagccttttttacaaaaatattattacagaaaacatgcaagaattgttatatgatcagatacatggacttgagtctgcatctggttgaacattccattaacaggtggtcatgcctgaatcagtgttaaacttgagaggatttcatccatttgtccttaagaagactgatcttatatcatacagttctggagaaaagactgaatcagcctcgaactagagtatcatcatggtcaatgaagaagcgatgagaagataaactgcagcatattcattgtaaagtctgctttgagca

SEQ ID NO: 50174 - DNA, 396 bp, Gossypium hirsutum
  Clone ID: LIB3197-019-Q1-M1-B11
gtttgagctagctagctcttactcaaatggcgaccaaaacgatgatgttgcaaatatttccacttttcttctttttgttcagtggctgcaactccattttccttggtgctaatggagatgacaatggtggttggcaaactgcccatgccaccttctacggtggtgctgatgctaccggcacaatggggggagcttgtggttatggaaacctgtacagtcaagggtatggaacgagcacagcagctttgagcactgcgacttttcaacaatggcttgagctgcggtgcctgctacgagctccggtgcaacaatgatcctcaatggtgcattagtcgaaccataaccgtgacagccaccaacttttgtccacctaactatgctttatctagtgacaat

SEQ ID NO: 50175 - DNA, 137 bp, Gossypium hirsutum
  Clone ID: LIB3197-019-Q1-M1-B12
gttttatctatctacccatcacggaaataaattccaatacaaagatatcccatctatttttacatttcttacttaaatacttactcagctacaccattcttctttcttttaatcccaattacaattttttacaccaa

SEQ ID NO: 50176 - DNA, 301 bp, Gossypium hirsutum
  Clone ID: LIB3197-019-Q1-M1-B2
cccacgcgtccgattttgatagtataatatggagaaatggtatggggtttcagggctggtgttggttttgagtttgttctttggggttaaaggagaaccccaagtcccatgttacttcatttttggagattcattggtagataatgggaacaataatgaactttgttcattggctagagctgattacttgccttatgggattgactttgctaatggaccgaccggccggttttcgaacggtcgaactacggtggatgtcatagctgaacttttggggtttgacgattacattcctccatac

SEQ ID NO: 50177 - DNA, 342 bp, Gossypium hirsutum
  unsure (1)..(342): unsure at all n locations; Clone ID: LIB3197-019-Q1-M1-B3
ggagttttgggtcaagctcctagtaatcctgctacatttacgccggggccacccacaccaccggcttctactcctcctccgacgactcaaccaccggctacaccaaccggcactccgccaccggtttctactcctcctcccacttcatcaccgcccccagtgacagcttcttcacccccaggttcaactcctccacccaggttttctccttccgcaactccaccacctgctttttcacctcctgcaacttcacctgcagcttcttcaccttctggaacttcaccttccggcacttcttcaccagcttnttcaccttccggcacttcaccaccagcaaccccc

SEQ ID NO: 50178 - DNA, 364 bp, Gossypium hirsutum
  Clone ID: LIB3197-019-Q1-M1-B4
cccacgcgtccgcggacgcgtgggtcaaatctcagtagcagcactgtacagctctaggcaattcatttcttgtgaaaataagggatacccatggagttttcccctggtatcagctatgatcaattgtggattcatttcttagtaggagttacgatgcctagaccatccttattctggttctaccatgaatttccattcgggtagaaaagatgcgcagaagcatgcagttgataaatcatgcatctattgcaacaaagtatttgacgactatctagctcttagtggccaccttaggattcatgaggaggagacattgagggccctgaattttcctggtcgttctagtaattccatcgacattact

SEQ ID NO: 50179 - DNA, 367 bp, Gossypium hirsutum
  Clone ID: LIB3197-019-Q1-M1-B5
cttgtttttattgcccataaacacgcgagtgcgttctgctggaaacgcggtacccacctcagcatgcaggatcgtccatgaaaataagacttttccttgattgcttttagcaacaattcccgtttccgatctggaattcccctcatcaaaggccgcgtcaaaattgattttgattcttccttcgcttggcgtctccacagtgccacacagagaactcgtcttctaggagcggaacagccgttgaaagcccgggcagccacgaaagactggtcaacattctcgacatcaatactggatcttggacataatagatttgacacaagtcgtttataatacaaatttgaaaaaataggaatatagttctttg

SEQ ID NO: 50180 - DNA, 387 bp, Gossypium hirsutum
  Clone ID: LIB3197-019-Q1-M1-B6
tgttgatgctggcattgcacccattgacatagcaaccagaaagatgaaagaagagatgaaattaaaagaggcacaggcaagagcagttgctgaccatggagaattggctctaatctctgtggagggtccccaaactgctacacaagaaagaataacattgagaccgcctatgttgcaggtggttcggttagcttctttccagcatgctccttctgttccacctttcttatcattgccgaaacaatataaagttgatggggatgatacagcaatgctaaaagagatggaagaaagaaaggttaatgagatagctgttggtgggggaggagtttcagtagcagttactcgttttccaactgagcaaaaacggcctgtggaccactaatt

SEQ ID NO: 50181 - DNA, 282 bp, Gossypium hirsutum
  Clone ID: LIB3197-019-Q1-M1-B7
tctaaagctttggaaggtattggtttatatgggaaatttagatccgttttattatacgaagtttaattaagagcgaattggggatgagtttcccgtgcgataatgatgaaagtcgggatctcaagaagccctttttacataccggaagatggtcttggatgacgtctatgcagcccagggttatgagagcttctgttcaagtccttcgcgatggatcaattttcgtagatctttgggtactcatagatgccttgggccctatccaatttggctttacctggg

SEQ ID NO: 50182 - DNA, 363 bp, Gossypium hirsutum
  Clone ID: LIB3197-019-Q1-M1-B8
tatatgttcaccaccactgctgaacgggaaatggtccgtgacatggaggagaagcttgcctatgttgccctggactatgagcaggaactggagactgccaaaagcaactcttctggtgagaagaactatgagttgcctgatggacaagtaattactattggagctgagagattccgttgtccaaaagggctgttgcagccatctctcattggaatggaagctgctggaatccatgaaactacctacaactctatcatgaagggtgatgtggatatcacgaaggatctctatggtgacattgtgctcactggcggatcaactatggtccctggtattgcagaccgtatgagcaaggagatcact

SEQ ID NO: 50183 - DNA, 403 bp, Gossypium hirsutum
  Clone ID: LIB3197-019-Q1-M1-B9
gttttctctgtttgccatttgccttaatcatcttcctctttctttaaaacctcttcctatttaatttccgactaaacttgcgctgaattccatggctactgcagaggttgtatcagctcagactgcaatccatgaggagaaacctgaagaagtggtcaaggttggagaaattgcaacagaagaggtaccggctgttgctcctgcagcagaacctgttgctgaagaaccaaaggaagcagtgcctgaagcagcatccggagaaccccaggctccagaaactgaagccacagttgaaactgaatcaaaggaggtggttaaagagcccaaggctgtgactgaggagccagaagttgagaaagcacagagtctacagaagcagcagcagcagcagcagcagcagcag

SEQ ID NO: 50184 - DNA, 193 bp, Gossypium hirsutum
  Clone ID: LIB3197-019-Q1-M1-C1
gccgagtcgaagaggattcaaacccctttccccacagcaaaaatgaagtacaacccacgagtctcctcctctcgtcgcaaggagccgaaggcccatttcacggcaccctcgtcggtccgccgtgtgttgatgagcgccccactctcattcgatttgaggtccaagtacaacgtccggtccatgccaatgcgca

SEQ ID NO: 50185 - DNA, 404 bp, Gossypium hirsutum
  unsure (1)..(404): unsure at all n locations; Clone ID: LIB3197-019-Q1-M1-C10
aatttccccccttgaaacccccaactttacaaacataccgtcctttaaaatttttaactccatgcccattgctatcttttcttcctcaaccccaattcttaaacgcccaaaaatctctcttcctccatggaagctgcttcgaggaatttattgagcttcatttccatgctaccgacatgttttctctttctcaaatctcctttttctttttgttttctcttgcaatctgcttatgttcggatttgaattagcttattattattttttgttctctctagggttttagtggatccattatagatgttttagaaatttaatgaatacggtttcgctcttttccttttttcccttttggttctcattacggnttcattctttatcctatttatttttcctaaaacttt

SEQ ID NO: 50186 - DNA, 407 bp, Gossypium hirsutum
  Clone ID: LIB3197-019-Q1-M1-C11
gcagtgcctgctggcgatacggtgcaagaaagatggacagagtcaaaggctccaagtgccaccaaagaaactgaagcgcttaataaagataaagcagtgaaggaagctactgtggtgcagaacaatgtcagtgatgaggcaaagaagcttgcagctgctgccctgtcagcagtgaaagatgctgcagctgctgcagcagctgcgtcaaatagagggaaaattgagattactgaggtacgagactttgctggtcaagaaattgaaataaaaaagcgaatccatgctgattcaaaagaggcagctgaaaagtccaaagcttatgcaccttctgcagtagatgctgttcttgaacaaatcaagaagaagccaaagctcagtgtgcttgacaagacgaaaaaagattgggg

SEQ ID NO: 50187 - DNA, 425 bp, Gossypium hirsutum
  Clone ID: LIB3197-019-Q1-M1-C12
cggacgcgtgggcggacgcgtggggaaaatgaagaagaagaaggatatagttgcagtctataaagggaaataagatatatacctttattattatggcaaaagaaggaaaaatatgatatcagccttgttattcatcattttttctttagattttttttgctttatttgttgtgaaatgtacagatgttggagtttgtagctgaactttagtacttggtagctgcttatttggatctgtagaaaaccatttagatttatagctaattgacctaaagatgacaaagataagtcccgatattgacgaaacaatgctgaaagagtcgattgtggctgtttcagctgatgtgagttttgcttcggaccactttccgaagtataaattaggacctgataatcagattttggaggagccaagaggggataac

SEQ ID NO: 50188 - DNA, 324 bp, Gossypium hirsutum
  Clone ID: LIB3197-019-Q1-M1-C2
gaaggaacatggttgatgctttagaacgaattggcctcaagaaatatttccaggcaataatttctgaggaagatggtatggagtcaatagctcatagatttttgtcagcagctgtgaagctggatcgtaaaccatctaagtgcgtcgtgtttgaggatgatccacgtggcattactgcaactcataactgtacaatgatggctgtggcattgattggctcccaccctgcgtacgatctagggcaggctgatcttgcaattggtagctttaatgagctttcagtgattaatcttcgaagattatttgctaacaagggttctactt

SEQ ID NO: 50189 - DNA, 380 bp, Gossypium hirsutum
  Clone ID: LIB3197-019-Q1-M1-C3
atttaagggctgctgggaaaagaggacattttcaagttcagacatatgtagcttcaaaaaaaccgatgaagggacatggcagagagatgattcaattgggccttccaattgctgatgcccctctggatgatgaaactgctgccaggacctccaaagtagatcggaaaatagaagccattccttccttgttgcaagatgctattgaacgtttggtcgacttgcaagttattaatgcaaagccagactcttgcatcattgatgtctataatgagggggatcattcaccgcctcgaatgtggccaccttggtttggaaaccctactttcgtcttggtcttgactgagtgtgacattacttttggagggttattggggtgatca

SEQ ID NO: 50190 - DNA, 284 bp, Gossypium hirsutum
  Clone ID: LIB3197-019-Q1-M1-C4
cggacgcgtgggaaaaaaaaaaaaaacataggggaaataaagacatagggagatacaaaaaaaacttaaaaacgcacatgtcgggcgatattagttattttaatcctaccaattgctgtttcctcatttgatgatgttatataatggcacgtccttcaaattccctggctatatctaaacaattctttttttggtgcaagatccttttgaccgtttggtttagttttaagacatttgtccctatccgcacttttgcattattcatagctttcatgacgggtggc

SEQ ID NO: 50191 - DNA, 357 bp, Gossypium hirsutum
  unsure (1)..(357): unsure at all n locations; Clone ID: LIB3197-019-Q1-M1-C5
cccacgcgtncgccctacccacagaatagccattcctcacgtttcagtttcaactttacccttctcccttcctcacgtctgaaacctcttcttttgttttttcgttctttttcccatttccttccagcctcttcactaattttacccttcctcacgtctgaagctccatcaacgcttcacccttgacgccttcgccctctcagcgattgggtaatatagagattgtacaatacaacaacatcaagtttcaagtatgggatttaggtggtcagacaagcatcaggtacttgtttttaagctatgtgttctcaaggaaacatcccaatacttttggtacagatgagattttcaattgat

SEQ ID NO: 50192 - DNA, 306 bp, Gossypium hirsutum
  Clone ID: LIB3197-019-Q1-M1-C6
aaaatttgtctattaagcttaaaatatcagaagggattgaatatcggtgatgttgggcgctttaaggagaaaagttgcgattggaggctcgtcagcctcggtattaaggaaagcgattcggccaggtatttcagcatctagagtttctgtcaatgttggagaagagattctattacttcaacctagaggaattgcccatgtccggaacttttctcatctcattctcccaggttggtctggtggtttagcaaaaacaagggatgtcttttctagcattcagttagagactatcatgcaaaagtcatg

SEQ ID NO: 50193 - DNA, 357 bp, Gossypium hirsutum
  Clone ID: LIB3197-019-Q1-M1-C7
ctgactcaagagtcactgaacgagtctagttcggactcagattacccaaaatggcattcacattgaggagtgtgaaagtaccgcccaactcaacgagtttggaagaagcaaggagccgggtcttcgatttcttcagaaaagcttgtcgatcaatccccactattatggatatctataacctagacgacgtcgtcaccaaatccgagctccgttcttacatctcctccgagatccgtaagaactctcatgttactaaccctaaggtaattgatttgctgctgtttaagggtatggaagagctgaacaacattgttgaacatgcaaagcaacggcaccacattatcgggcagtatgtgc

SEQ ID NO: 50194 - DNA, 421 bp, Gossypium hirsutum
  Clone ID: LIB3197-019-Q1-M1-C8
aagagggggaatgcatattacggaagctttgcgcatgcagatggaagtacagaaacaattgcatgaacagctggagctacaaaggtcgcttcagttacgcatagaagaacatgcaagatatttgcagaagatgttggaggaacagcagaaagctggcaatgccttagttccgaacccaaactccgaactgccatcaaggattgcatcagaaaccgagccttgtgagtccaaaaccgagtcaccaacatctctaccatcaaagtataaagctcccaatgtggaggattgtaaactgaaatcaagtccgaaaaggcttcgtatggacgaagccgaggccgaggtagaaaatcctgagcagtaacaagtgggaattttgatttggttttgtagatccatccacagtagaaaggtagtgattgaa

SEQ ID NO: 50195 - DNA, 393 bp, Gossypium hirsutum
  unsure (1)..(393): unsure at all n locations; Clone ID: LIB3197-019-Q1-M1-C9
ggtagatcagatctgtcggtgctcctgcattgtccgcccactactcttccaaatcctcatcatgtacggcagagatccgtggggaggtcccctggagataaacgccactgattctgccactgacgacgacaggagcaggaatctgcaggacctggatagggctgcactctctcgccccttggacgagactcagcaaagctggctgcttggccccggggagcaaaagaagaagaagaagtacgtcgatctcggatgtatcattgtgagccgcaagatctttgtatggaccgtggggaccctgctcgtctccgccctcctggccggactcatcaccctcatcgtcaagactgtcccacgtnatcaccaccgccactctccgcccgataactacac

SEQ ID NO: 50196 - DNA, 377 bp, Gossypium hirsutum
  Clone ID: LIB3197-019-Q1-M1-D1
cttctctaaaacatttcccgatgtccaccgtaacagtcgtcagatccccctaacgagccgctgagtctcttgactgtttttttttattgaaatcagtgttagatttttgttccgtacatggcggaggaagacgtcgttcccaaaaccttccgagctctcgtcgagagcgcggaccgtaaattcgcacgagtccgggacttaccgtcgtacggacgagcacaaggccaacactatttccagaaagtcttcaaagcctatatgcggttatggaagtaccagcaagagcaccgacccgagcttgtcaaagccggtttgaaccgttgggagattggcgaaatcgccggtcggatcggccagctgtatttcggccagtacat

SEQ ID NO: 50197 - DNA, 413 bp, Gossypium hirsutum
  unsure (1)..(413): unsure at all n locations; Clone ID: LIB3197-019-Q1-M1-D10
atttatcttattcttcttcttcgctttaggcttttacgctgctggcagaaagctacaataaaccatgccgaagaacaagggaaagggaggaaagaacaggaatagaggaaagaatgaagctgacgattagaagcgtgaacttgtgttcaaggaagacgggcaagagtatgcccaagtgcttcgtatgctaggcaatggccggtgtgaagccatgtgcatagatggtactaagcgcctttgccatatccgaggaaagatgcacaanaaggtttggattgcagctggtgatataattcttgtccggcttcccgactatcangatgacaaggctgatgtgatccttaagtacatgcccgatgaagcaaggctcttaaaggcatacggtgagctttcagagaacactcgtcttaatg

SEQ ID NO: 50198 - DNA, 415 bp, Gossypium hirsutum
  Clone ID: LIB3197-019-Q1-M1-D11
gagagctggtactacttgaaagatgccgtgctggaaggtggaattcccttcaacaaagcctatggtatgaccgcattcgagtatcatggcacggatcctagattcaacaaggttttcaacaggggaatgtctgatcactctaccattaccatgaagaagattcttgagacctatgatggctttgagggactcaaaacactggtcgatgttggcggcggtactggagctacgcttaacatgcttgtcaccaagcacccttctataaagggcatcaactttgatttgcctcatgtcattgaggatgctcctgcttatcctggggtggagcatgttggtggagacatgtttgaaagtgttccaaaaggagacgccatcttcatgaagtggatatgccacgattggagcgatgagcact

SEQ ID NO: 50199 - DNA, 410 bp, Gossypium hirsutum
  unsure (1)..(410): unsure at all n locations; Clone ID: LIB3197-019-Q1-M1-D12
ccacttcttcccttccattttactttgttttagttgccataacgtcaccttccaatacaacccacaatgaggcaacaatatgtcttcactactctcacgttgctcatcctgttttccctcagttgttcaacaacattagcccaatctccggcactggccccggcaccttctggcccgacaaacgtcaccaagatcctcgaaaaagccggtcaattcaccctcttcattcgtcttctaaagtccactcaagtggccaaccagctgctcggtcagctcaacaattccaacaatggtatgaccgtttttgcaccaacggacaatgctttctccagccttaaatcgggcacattgaattcactcaccgatgaacanaaagtgcagctggtgcaattccacatcgtcccaacata

SEQ ID NO: 50200 - DNA, 338 bp, Gossypium hirsutum
  unsure (1)..(338): unsure at all n locations; Clone ID: LIB3197-019-Q1-M1-D2
agagaagtgattttaaggaaaaatggcagaagaattgacgtgggatttggaagagcttaggcagcttcaaagcatggcaaagagaccacgcactctatctcttatttcctgtgagattcgcaacttggagaagaccttgaaagagaatgaaaatggggcttctcctgttactggtccacaaattccaactcccatttcaacctcagttaagactccagttaaccctgcactgagttatgttacacttgcctccttcagctgggatcaagataacgataaagncaagatatatgtctctctggaaggagttgaacaggagacaattcagacagagttca

SEQ ID NO: 50201 - DNA, 351 bp, Gossypium hirsutum
  Clone ID: LIB3197-019-Q1-M1-D3
cttccatgaaggactggagaggtggtagagctgcttccttcaatatcattcctagcagcactggagctgccaaggccgtcggcaaagttttgccagcactgaatggcaagctgactggaatggctttccgtgttcccactgttgatgtctctgtggttgacctcactgtgagacttgagaagaaggctacatatgatgaaattaaggctgctatcaaggcggaatctgaaggcaacttgaagggaattcttggttatgtggacgaagatttagtctcaactgacttcatcggagacaacaggtcaagcatttttgatgccaaggctggaattgctttgaatgacaactttg

SEQ ID NO: 50202 - DNA, 377 bp, Gossypium hirsutum
  Clone ID: LIB3197-019-Q1-M1-D4
cttttccaaatcttttcagatggatcgttaccagagggtggagaagccgaaagcagagacacccattgacgagaatgagattcggattaccagtcaaggaaggatgcgtagttatatcacttatgccatgactctgctccaggagaagggatcgagtcaagtagtttttaaggcaatgggaagggccattaacaagactgtgaccattgtggagttaattaagagaagaatcgttggtttacatcagattacatcaattggatccatggatataacagatatgtgggagccgctggaggaaggacttcttccattggagaccaccaggcatgtgtcaatgatcactataaccctttcgaaaatagaattgaatacgt

SEQ ID NO: 50203 - DNA, 295 bp, Gossypium hirsutum
  Clone ID: LIB3197-019-Q1-M1-D5
atgtgagccatcacacccagcggggagtttttaataagggtattggactaatagctccatcttttttgtgttgcatcagccaccttgagcaatatagcagtctcctgattgatctccttacatttcttaatataagtgataaattgtgacttgtagatctaacaaaaattaggtgccctcgttgcagctgccacggaaagctggtctaatatcaaagcaaactatccttcttctcgagcagagtttttaaggtaggagtgtgtgtatattgacattttcctagcagttgctgaag

SEQ ID NO: 50204 - DNA, 419 bp, Gossypium hirsutum
  Clone ID: LIB3197-019-Q1-M1-D7
gggaaaggtacaagtgggatgcatggaaggctgttgaagggaaatcaaaggaggaagcaatgggggattatatcaccaaagtaaaacaactgtttgaggctgctggaagttcttgatgtgtgtgtgtatggccaatgaaaatggtgtaatttcaagcccttgtttgttacttggggttttcattactatgaataaattatgtactctttttctattgctatatgttatttatagtagaaactccttgatttacttttattcttgtggttattacaaaggagatttttacacaaggatggtaatggaacggagcgagagcaattgcatgaattgtctcatccatttatatatgttatgttatgaatgtcacattgttaccatgtactctttttcatgttatttccaatggtgatgaaccg

SEQ ID NO: 50205 - DNA, 300 bp, Gossypium hirsutum
  Clone ID: LIB3197-019-Q1-M1-D8
gaaggccggttgagttatttacacggttgggagcttttggaggattcttcatcatctttaaggctttttgttttcggtcaatggacgtatacggcaaaaccatggctgttgcccctgcaaatgttatttatttgtctactattctgggccgtgatggtcctatccctgttcacaaatgcgattggaaatgtcaaaacgaacatgtttgtggcaacatgtatcgctgcaaactaactggaattacacacatctgtgacaagaactgtaaccagcgaatcttgtatgataaccatagttccc

SEQ ID NO: 50206 - DNA, 371 bp, Gossypium hirsutum
  Clone ID: LIB3197-019-Q1-M1-D9
gtttcgatgatggatgggaaagtcggtggggaaaatctgactggaagaaagatgacaacatggctggggaatggaattacacttctggaaaatggagtgggaatcttaatgacaaaggtattcaaactagtgaagactacaggttctatgctatttcggctaagttcccagaagttaacaacaagggcaagactctagtcttccaattttctgtcaagcatgagcagcagcttgactgtggtggtggttacatgaaactactcactggtgacattgaccagaagaattttcgtggtgacaccccatacagcattatgtttgggcctgatatctgtggaagcacaaagaaagacatgctattcttcattaca

SEQ ID NO: 50207 - DNA, 248 bp, Gossypium hirsutum
  Clone ID: LIB3197-019-Q1-M1-E1
atgtcccagatgcagacgcatgtctctgacacctccggggtcctctccatggacaacaaccgcaacctggacctggaacagcatcatcgccgaggtcaaggcccagtatgaggagatcgccaaccgcagccggaccgaagctgagtcttggtaccagaccaagtatgaagagctgcagcagacagctggccggcatggcgatgaccttcgcaacaccaagcatgagatctctgagatgaaccggatga

SEQ ID NO: 50208 - DNA, 414 bp, Gossypium hirsutum
  Clone ID: LIB3197-019-Q1-M1-E10
ctttaatttcttgttgttttagcatgttgtgtgtttgtcgatcagtccttaattataatcgtcaattgcctaagtgcatgcccactgttctgcttcattgaatgcatgttaagcatgttgttattttatgtatctcttgtttgcacgattgtaaagcaaaccactgttttgatcattgatcgcgtgatcatggcatgcttctatattatattggatctgattctactattctgatataatgacattactcactgcgtttggcttgattggagacaaaggagatctatggagttttggtggtcaattcgcaattaatggagttctggcggtaaatctacaattttagaattatgtttggagttctggtgatttgctcgcatattgttctggcgattgattcgcaacactgttctg

SEQ ID NO: 50209 - DNA, 424 bp, Gossypium hirsutum
  Clone ID: LIB3197-019-Q1-M1-E11
ctccagtgagtttctttgaaagaaaatcagtgaaaacagagagtgacttactttgatgttcgaactttgaagacaaaaaaaaaaaatgcttctccaaactacaatctcatctcggcctttatatcaacggcatgcgtgcttctcagcaacccaccagcttcctctttattactctttcctcgcatctgcctctctcaacttcacccgcaaaaacctcttcttccaggccattgttccgtgctatcgtgaaccagctttgaaaaacacaggggcaggcaatggagtgaatgacactaaatttctcaacctacagatgtttcaaaagggaatggcagcaaaatcttttacgtcatcacgctttgatgaatccttgaagaatcatcgagctatggctgatgacttaaatgtgaagaagccattgagt

SEQ ID NO: 50210 - DNA, 423 bp, Gossypium hirsutum
  Clone ID: LIB3197-019-Q1-M1-E12
cggacgcgtgggaaaagattaaaagaacacttcagacaaaatggactttcgaaggccagttgaatttattggtattattcttgaatattgcatcattgtacaacctccactccaactagtttactgagaaagtattttggaccgtaaaagagtatttatttttgacttgctatggatctaacctttacatccaagaatatgctgcatctacctcattatatgatctgctgcctggtgatcatggtgcatttactaaaagccctgataacttcatggtactctacatacatatatttatgagattcttcatctgattggttattaatgtggtggtattacgcttcagtactttgatttgggtagctgttaatgtattagcttagtttgatattatctagcatctttggttatgatgtttttatt

SEQ ID NO: 50211 - DNA, 316 bp, Gossypium hirsutum
  Clone ID: LIB3197-019-Q1-M1-E2
acggtgaagaaaaaaatggttggtgtgttttaggttagtgaagggggtatccgggaccaagtggctttggttcagcctccaccgcccaagaggttaccgaaaggattgatggaaccaacttgactgctctagttaccggaggagcaagtggaattgggttggaaacttctagagtattggctcttcatggagtccacgtcatcatcggtgcaaggaacatgaaagccgcgaatgaagcaaagaacaaaattgttagagagaacacaagagcccgtatagatgttctggagctggatctgtggtctactagttcaat

SEQ ID NO: 50212 - DNA, 345 bp, Gossypium hirsutum
  Clone ID: LIB3197-019-Q1-M1-E3
cttcactcccgtcctcacatttcccaacaaaaagcgaaggaaatcattttcatcaatcccccccatcacccttctttatctttcccacggaaacgaagagcaaatcagaaaaccttgtgaagaaaaaatgagggaaatcttgcatatccaaggaggccaatgtgggaaccagatcggggctaagttctgggaagtcatatgcgatgagcatggaatcgacaacactggaaagtataacggtgactccgatctccagctggagcgtatcaatgtctactacaatgaagccagtggcggtaggtatgtccctcgcgctgttctcatggatcttgaacctggcactat

SEQ ID NO: 50213 - DNA, 374 bp, Gossypium hirsutum
  Clone ID: LIB3197-019-Q1-M1-E4
cccacgcgtccgatttatacgttaatggctacttgctttttatcatcatattggttaaagcaacagttcatcattgttgtctttctctttaccgtaatatccagcatcagtttaccggtgaatggatgtttcacatcgattttcagcttcggggattccatgtcggataccggcaactcaattgagatttcagttttggaaaccggcaagctttctgacggtgcttttcctccaaatgggcggaccttcttccaccgtccaactggccgcgcttgcgatggccgcttggttatcgatttccttgctgaagctttgggattgccatttcttccaccatattatcgatataaaaatggaacatcatataaatttga

SEQ ID NO: 50214 - DNA, 303 bp, Gossypium hirsutum
  Clone ID: LIB3197-019-Q1-M1-E5
cagcaactaaagctttgaggaaatggcgttggctttcgatgagtacgggagacccttcattatactcaaagagcaagaccagaaaaccaggctgagagggatcgatgcccaaaaagccaacatttccgctggcaaagccgttgcccggatcctccgaacctctctcggacccaagggcatggataagattctccaaagccccgatggcgatgttaccatcacaaatgacggggcaacaatattggagcagatggatgttgacaaccaaattgctaagttgatggttgaactatctcggagtca

SEQ ID NO: 50215 - DNA, 406 bp, Gossypium hirsutum
  Clone ID: LIB3197-019-Q1-M1-E6
cggacgcgtgggcggacgcgtgggttttagattccctttccattgcactgctctttctttctatagaattagtcactcctgttctagatgaaggttctctccccaattcttgcttgcctagcgcttgctgtggtggtaagccatgctgctctctcacctgagcaatattggagctataagctgccaaatactccaatgccaaaggctgtcaaagaaattctacatccagaactgatggaggagaaaagcacctctgtaaatgtaggaggtggtggtgtaaacgtcaatacaggaaaagggaagcctgggggtgacacccatgtgaacgttggaggcaaaggagttggagtgaacacgggaaagccagggggtggcactcatgtgaatgttggagacccttttaatt

SEQ ID NO: 50216 - DNA, 243 bp, Gossypium hirsutum
  Clone ID: LIB3197-019-Q1-M1-E7
ccgacgcttacgctttctcgtagggtataaagcacctttgcagtgcgctactctctacatttctagaatacagcacttctagtctacatgacggatatggttcgaatccttaaatgcctatctctcgctggatacgtagccacacggatctctcaacggatctatatcccaactctaagctatcaaacactcacaatgccaatggctgccttacaaattctacattcagaactgctggatgag

SEQ ID NO: 50217 - DNA, 324 bp, Gossypium hirsutum
  Clone ID: LIB3197-019-Q1-M1-E8
cggacgcgtgggaaaaaaaaaagaaaaaaagggaaaaaaaaaaaaaaaaaaaaaaaaaaaaaaaaaaaaaaaaaaaaaaaaaaaaaaaaaaaaaaaccaaaaaaaaaaaaaggggggggccgttttaaaggatcaaagtttacttccccttccttgcaacttaatagtttttttttggggccaccaaaataaaattaattgcccgccgtttaaaaacgtcggaattggaaaaaccttggcgttcccaaattaaatggctttgaagaaaatccccttttcccaagttggcgtattaccaaaaaggccccaaccattcgcctttcc

SEQ ID NO: 50218 - DNA, 422 bp, Gossypium hirsutum
  Clone ID: LIB3197-019-Q1-M1-E9
ggaaaagttctgaattaagcaccgttctacaacattttattcgtgcatgtaacaatatgttgaataaaagggctgatcttgaaacttttgctgaagaactctcatttactttggactggattgtgaactattgcgttactcctaaggaagcttcgagtgcgagggataagatcaaaagacattttggttggaatgattcacaaagtgaaaaagaagttgcttatgcaagccatggtgtggaatcagatgtgacccacatttctaaagaacaaacatcacttgtagactcctttgcttctttgcctgatcagagtcacagtgttatccccccactggaggaagaaaacaagagattaaaagatgatctgaaggatatgaaaacgaggctggagtcagaaacagacaagagtgaggccctgatg

SEQ ID NO: 50219 - DNA, 365 bp, Gossypium hirsutum
  Clone ID: LIB3197-019-Q1-M1-F1
cttcatctctctgtatctctttgagtgacttctttttagttctctctccggttccacctccgttcacttcgaaaaatggcctctcacattgttggatatccccgcatgggacctaagagagagcttaaatttgctttggaatctttctgggacaacaagagcagtgccgaggatttgcaaaaggttgcagctgatctcaggtcatccatctggcaacaaatggctgctgctgggatcaagtacatcccgagcaacactttctcttattacgaccaggtgctcgatgcaacatcgatgcttggagctgttccacctagatatggctggaacggtggagagatcggatttgacacttacttctcaat

SEQ ID NO: 50220 - DNA, 426 bp, Gossypium hirsutum
  Clone ID: LIB3197-019-Q1-M1-F10
ctattcttcacaaaaaagaaaaaaaaaaatacagtgaaaatggcaacccttaaggttccagctcatgtacctgccccttctgaggatgctgagcaacttcgtaaagcttttgaaggatggggtacaaatgagcaattgattatcgacatattggctcacaggaatgcagctcagcgcaatttgattcgtaaaacttatcgtgaagcttatggggaagatctccttaagtctttggatgaggaactttcaagtgactttgagcgagctgtggtgctgtttactttggaccctgcagagcgtgatgcatttctggctcatgaagctacaaagaggttcacatcaagccattgggttctcatggaaattgcttgcactaggtcttcacatgaactgttcaatgtgaggaaggcgtatcacgatctttac

SEQ ID NO: 50221 - DNA, 425 bp, Gossypium hirsutum
  unsure (1)..(425): unsure at all n locations; Clone ID: LIB3197-019-Q1-M1-F12
ttccagatcaagagattttcaagtgtttggacagttttgagagtgggagggaaaaaaaatggagaggagcactccagttaggaagccacatacttctacagcagatctgctcacttggtctgagactcctcagccggacaccgccaccttcgccgctcgctccgtccgacctcaccagccgtcggatgggatcagaaaagtggtgtttggaggccaagtaactgatgaagaatttgaaagcttaaacaaacggaaacctccttctggatataaaatgaaggagatgactggtagtggtatttttgcagccaatgtagaaaatgatgagtccgaaccaggcagtgccaatcctgcttcaaacaacaagacgggattacgaatgtaccangaagcactagctggaattagtcacatttcttttgctg

SEQ ID NO: 50222 - DNA, 63 bp, Gossypium hirsutum
  Clone ID: LIB3197-019-Q1-M1-F2
gcttatacactactataggaaagctgtcgcctgcagtccggccgattcggtcgcccacgcgtc

SEQ ID NO: 50223 - DNA, 278 bp, Gossypium hirsutum
  Clone ID: LIB3197-019-Q1-M1-F3
ctgaaatggagaaattacacgttgtggttatgcctaattcaggctagggtcttgttattacttatatggtaacatatgtctaaacttatctaacacgaggcttaaaaatcagctttgtttactcagagttgaataataggaaggaactgggtgcattaccaaagaacgaggacaaaaatggtttattttatctactgggaatagaccaatggagctaaaagatggggaagataggaataaaggctggaagttaactgatagttaatgcctgcattgtg

SEQ ID NO: 50224 - DNA, 376 bp, Gossypium hirsutum
  Clone ID: LIB3197-019-Q1-M1-F4
cttgttattacttgtgatggtctctatgatcttagtaaggagctttctaatgtagatttcgtgttgacattattctataaattgattgatgtgagtggaaatgctgttccttgttcgctaacaaacccgttaatgctaaggctaatatatcagaaatgttgaatatgaacaagccgacattcttttataaagtaaattaacatgactaaagaaaactcgattcggatatgttgtttatgaatagtataacagaaatgctattgagacactgttttattgattctttcgagcatcttatacctgtcgacctttttcttcttttaatatcagtatgaaatgtcttgataaaataatgttgatgtgttcatatttcacg

SEQ ID NO: 50225 - DNA, 354 bp, Gossypium hirsutum
  Clone ID: LIB3197-019-Q1-M1-F5
ccaaaactgaaaacaagcgttcagaacacaggcattatcaatagcttacatcatcattctcttccatttcaattcagtttctcacaaaacccaaaaccttgcctttccctccctcaatcatccaatggcggagctgaaactctccgagagccgagacctgacccgaatcgaacgcattggggctcattcccacatacggggcctaggcctcgactcctctctggagccccgtgacgtctcggaagggatggtgggccaagcacaagctcgtaaagctgccggtgtcatcctccaaatgatcaaagacggtaaaattgctggccgtgctatcttattagcgggccaacctggaac

SEQ ID NO: 50226 - DNA, 384 bp, Gossypium hirsutum
  Clone ID: LIB3197-019-Q1-M1-F6
cttttagattccctttccattgcactgctctttctttctatagaattagtcactcctgttctagatgaaggttctctccccaattcttgcttgcctagcgcttgctgtggtggtaagccatgctgctctctcacctgagcaatattggagctataagctgccaaatactccaatgccaaaggctgtcaaagaaattctacatccagaactgatggaggagaaaagcacctctgtaaatgtaggaggtggtggtgtaaacgtcaatacaggaaaagggaagcctgggggtgacacccatgtgaacgttggaggcaaaggagttggagtgaacaccggaaagccagggggtggcactcatgtgaatgttggagacccttttaatta

SEQ ID NO: 50227 - DNA, 334 bp, Gossypium hirsutum
  Clone ID: LIB3197-019-Q1-M1-F7
ctgacagaaaaattgctgatagatgtactagtataaaacagggtcatcagagaacatagtcatgcaagctgttaatatcttgatgactgatttttacatgtttaagtcgcaaaagtggtcttgaaatgaattatatagtttcgtattggagctataagctgccaaatactccaatgccaaaagctgtcaaagaaattctacattcagaactgatggaggagaaaagcacctctgtaaatgtaggaggtggtggtgtaaacgtcaatacaggaaaagggaagcctgggggtgacacccatgtgaacgttggaggcaaaggagttggagtgaacac

SEQ ID NO: 50228 - DNA, 374 bp, Gossypium hirsutum
  Clone ID: LIB3197-019-Q1-M1-F9
acgccacgcgtgcgtacgctatttagtgtgcggggtattggcctggagatacagacatgtggtaaaccgattgattcgctgttagagaaggtgctttggatgaatatattatactctgattatttcaaagagctttacccgactaaagacttaccatgaagtcattggtgaaatttacaatcaagttgatcatgtcgaaccgtggatgactgggaattgacgtggtacttgtactgcattgtgccttctttacaagttttttaccatgaaacttactgtcaagcaaatgcatgggctactgaagcaccctgattctccttacattagagcaattggattcctctacttgagatatgctgccgatccgaagactt

SEQ ID NO: 50229 - DNA, 338 bp, Gossypium hirsutum
  Clone ID: LIB3197-019-Q1-M1-G1
acgaccacgcgtgcgtacgctatttagtgtgcggggtattggcatggagatacagacatgtgggtaaccgattgattcgctgttagagaaggtgctttggatgaatatattatactctgattatttcaaagagctttacccgactaaagacttaccatgaagtcattgatgaaatttacaatcaagttgatcatgtcgaaccgtggatgactgggaattgtcgtggtccttctactgcattctgccttctttacaagttttttaccatgaaacttactggcaagcaaatgcatgggctactgaagcaccctgattctccttacattagagcaattgga

SEQ ID NO: 50230 - DNA, 429 bp, Gossypium hirsutum
  Clone ID: LIB3197-019-Q1-M1-G10
attggtaccatggactatatcattgacacagtgtctgcggtccatcccctacttccactgcttagtctgctgaaggtgaatggaaaattggtcactgtgggattgcctaataagccactcgaattgcctgtttttcctttagtcatgggacggaagcttattggaggaagtgatgttggagggatgaaagaaactcaggagatgctagacttctgtgccaagcacaatatcactgcagatatcgagctgattcggatagaggaaatcaatacggccatggaaaggcttgctaaatctgatgtcagataccgatttgtgattgatgtggcaaattccttgtcacagtagggttcattgtgaaggaactagtccagtaagtttaaagattatgatcttaatggagaagagaaaacagatgaactttgatgg

SEQ ID NO: 50231 - DNA, 400 bp, Gossypium hirsutum
  Clone ID: LIB3197-019-Q1-M1-G11
aattgagacagctaagctccatcctccacttttcactcccaccagatcgcgtcttcttcctccactattggtgctgttgttgtttcagagttaagtgtttgctggacaaaagcaggagaataaaaacatgtctaacttttacaatcagacgagagcagcctcgtctctgatgagacgccttaaacgaagcctcatcaatccaactgctgtcagtcgcgctagatgtttcaccaccgccgagggccaccgacctagccttgtccacaagcgcagcctcgatatcctccacgatccatggttcaacaagggaacagcattttccatgacggaacgagatcgtctggatcttcgtggcctgcttcctccaaatgtaatgtcttccgagcagcaaattgaacgc

SEQ ID NO: 50232 - DNA, 425 bp, Gossypium hirsutum
  Clone ID: LIB3197-019-Q1-M1-G12
cggacgcgtgggaaaagaaaagaaaaattacagtgaaaatggcaacccttaaagttccagctcatgtacctgccccttctgaggatgctgagcaacttcgtaaagcttttgaaggatggggtacaaatgagcaattgattatcgacattttggctcacaggaatgcagctcagcgcaatttgattcgtaaaacttatcttgaagcttatggggaagatctccttaagtctttggatgaggaactttcaagtgactttgagcgagctgtggtgctgtttactttggaccctgcagagcgtgatgcatttctggctcatgaagctacaaagaggttcacatcaagccattgggttctcatggaaattgcttgcactaggtcttcacatgaactgttcaatgtgaggaaggcgtatcacgatctttac

SEQ ID NO: 50233 - DNA, 348 bp, Gossypium hirsutum
  Clone ID: LIB3197-019-Q1-M1-G2
gcggcattagcaaccatagccatggattgctcaccgaaactctggggtatgtctatcctgtggctttttgccctcttctccatgcaaaaccgtgctagagaggactttagcaaattcccaagagttaacatcgctgagaaagagacagcctcccgagagcagaagcgcgagaccttagtttcccagaccacccagaagccccaagaacaagagccaagggtcattcctgaaacccaaaatggttatggtctttacggccacgagtcaaggtcaagccgggccaggttcaccaccaaagaaacctatgaaccctatgtcacccctcgtagattccaccctgatgagccc

SEQ ID NO: 50234 - DNA, 342 bp, Gossypium hirsutum
  Clone ID: LIB3197-019-Q1-M1-G3
aacaaagtgaaatattgctgagagtttgtggagatgagtgccttgagtgagggtcttacccaaattctgatccctttagcttccttggtgggcattggttttgcagtgcttcaatggtttttggtctctagggtgaagctctcatcacaggattcaagcaatggatataaacaaaaactgattgaatctgatgaagaagaagagggtattaacaatcttgagatttccatcaagtgtacggagattcaacatgccatttctgttggagcaacctcttttctctttactgaatacaagtatcttggtatcttcatgtgtgtatttggggctatcatattcctc

SEQ ID NO: 50235 - DNA, 371 bp, Gossypium hirsutum
  Clone ID: LIB3197-019-Q1-M1-G4
cccacgcgtccggtactttagaaaaaagaatctactgcgtctccaaatggcccttcgatcattagccaccaggaaaaccctaaccttggctctcaagtccaccaggttggctcagtctcgagccttgcagaccttctcgctccccgatcttccgtacgactatggggcactcgagcccgccatcagtggagagatcatgcagctccatcaccagaagcatcaccaaacttacatcactaactataacaaggctttggagcagctccatgacgctatccagaaaggtgattcttccaccgtcgttaagttgcaaagcgccatcaagttcaacggcggaggtcatatcaaccactcaattttttggaagaatc

SEQ ID NO: 50236 - DNA, 433 bp, Gossypium hirsutum
  Clone ID: LIB3197-019-Q1-M1-G5
gagaaaccgaaggggaaggagacagagagcggcactgcaaaaaaaaaatgtctgcaacgggaaacgtcggcggcggaggaccagaggaggataagaagccggccgatcaagctaatcacattaatctcaaagtcaagggccaggtttttactttttacgtcatttagatcatctctgttgtttttcttttcgattttttttcttcttttcatttatttgttttttgatctcgtttttgtaggatggaaacgaagtgtttttcaggattaagagaagcactcaaatgaggaaactgatgaacgcatattgcgataggcaatcggtggatctgaactccattgctttcttgtttgacgggcggaggctccgtggagagcagactcccgatgaggtaaatttccttacgtgttctcgatgttccgaaatgatatac

SEQ ID NO: 50237 - DNA, 389 bp, Gossypium hirsutum
  Clone ID: LIB3197-019-Q1-M1-G6
cgaaaagacctacggtgtccctcgtcgtcgtctcaccggtcactctcacttcgtccaagacgttgtcctctcttccgattctcagttcgctctctctggttcctgggatggtgagcttcgtctctgggacttatctgccggtatctcagctcgccgttttgtcggccacaccaaagatgttctctccgttgccttttcaattgacaaccgtcaaattgtttctgcttctcgagatcgaactatcaagctatggaatacccttggagaatgtaaatacacaatccaagaaggtgacgctcataccgactgggttagctgcgttcgtttcagcccaatactcttaacccaccattgttcagctcatgggacagactgtaaagttggaacct

SEQ ID NO: 50238 - DNA, 368 bp, Gossypium hirsutum
  Clone ID: LIB3197-019-Q1-M1-G7
cccacgcgtccgccctaaagtgcgcctctcccaatttcttcttcactttgaagtttgagcagatcggatggttcgttcatccaaggtggtcaatgtgggaactagatcagggctaatttctgggaagtcatatgcgacgagcatgaagttgacaacactggaaaatataacggtgactccgaccttcagttggagtgcatcaatgtctactacaatgaagccagtggtggaaggtatgtcccacgcgctgttctcatggatctggagcgctattctcatggatctggagccgggcactatggattccgtcagatctggtccttttggacaaacctttctccccgataacttcatcttcggacagtctg

SEQ ID NO: 50239 - DNA, 415 bp, Gossypium hirsutum
  unsure (1)..(415): unsure at all n locations; Clone ID: LIB3197-019-Q1-M1-G8
gtggtcattggtttgtggcacaacaccatgtatgatatgtggttcaggagaaattgaaggagccttattgaaatacttgggggttgagcgcaatgaggtaacaaagacggtttattctctgttggagaaatggaatgtatgggatgttgtgtaaatgctcctatgattgcagttgctgattacaccaatggatttgaaggatataagtataattactatgaagatgttactactcaatgagttgttgagatagttgcagtgggattttgccaagagaactgatgcctcaaagtgttactgcaaggcttccaacctcagaggagctcgatgcctatgcacatgagcaatgggagctttgtaagcaatgtttcttgctgcaacttataagttcangacaagctgaaaaatcaacgag

SEQ ID NO: 50240 - DNA, 411 bp, Gossypium hirsutum
  Clone ID: LIB3197-019-Q1-M1-G9
ctcgaagcttccttttccgttttagatctcaaaattcaaaaggctctctttttcatctcatggctgctactattgtctccgtcaaagctaggcagatcttccacagccgtggaaatcctacggttgaggttgatgtggaaatatcgaacggtataaaggctagggccgcagttcctagcggtgcatccactggaatttacgaggctcttgagttgagagatggaggttccgattacctcggtaaaggtgtatcgaaggctgttgctaatgttaacacaatcatcggccctgcattgattggaaaggacccaaccgagcagactgcaattgacaatttcatggttcaacaactggatggaacccaaaatgagtggggttggtgcaaacaaaagctcggtgcaaatgccattc

SEQ ID NO: 50241 - DNA, 287 bp, Gossypium hirsutum
  unsure (1)..(287): unsure at all n locations; Clone ID: LIB3197-019-Q1-M1-H1
cgcaacaacactgaaagccaatggcttcctgtctgaacagcgcctgactgtttgacggtggttcgnttcttcaactttgtcctcttgcttcgacgccgttagactattgtctgcgtccactacgctttctttctattcttgtatacaaatccctcggtttctctactctgtctcgccacaagaggggatcgggtgtgagtatgtcgagcaccggacgggttaactatgtagccagtcctaaatgcgctgctgcggatcctgatcagttgaagagtgcttgagaagat

SEQ ID NO: 50242 - DNA, 309 bp, Gossypium hirsutum
  unsure (1)..(309): unsure at all n locations; Clone ID: LIB3197-019-Q1-M1-H10
cccacgcgtccgtgaagatgtcacgaggtcccgctcaggctcttcgtgtttcattggtgttctctctctgcctatatcccttgcactccctatgatgaagagttgaaatttttgccatgtatgattgcatatgtagattttcattttatttattaagtacggagggaatatagattatgaaaaaaaaaacaaaaaaagaaaaaacaaatcaataaaaaaataaaaaataaacaaacaaactncgctggcttttggggggtctgaccctgatcgcctttcggatcgaggcgacccacgtactgtatccca

SEQ ID NO: 50243 - DNA, 427 bp, Gossypium hirsutum
  unsure (1)..(427): unsure at all n locations; Clone ID: LIB3197-019-Q1-M1-H11
ctcaacattgcgtacaatgtttcccctcatggaagataagaagagccttgcttcagcgaatgagctcgctgaggttgaaggtaaggcttctttgatggctgctgttgattattacgtgagccttaaaagtgacatcttcatctctgcttctcctggaaacatgcacaatgctctgcttggacatcgagcttacttgaacttgaaaaccattcgaccgaacatgttactgctgggcccactattcctgaacaaaaccatagagtggtctgagtttcagcatgcggttattaatggacataaaaataggcaaggccaaacgaggttaagaaaggagaagcaatctatatatacatatccagccccagattgcatgtgtagagcttaaacttcgtaaacattatggtatgaagctantttatgtgtcttt

SEQ ID NO: 50244 - DNA, 400 bp, Gossypium hirsutum
  Clone ID: LIB3197-019-Q1-M1-H12
atcaccttcactataaaaaaccctttcctttattttgggttctttttccttctaaatttttggttttttttttctctttttaattatgaatccatagcagagagatcatagaaagaaggcttgacctttgattgatctcgcaataaggaagtttatttttttaatttaaaaaaatgctttttctttttaagttaaaaagattttaaaagacccaaaaaaagtataaaaaaaatgtctgttgcagagctgaaagagaagcacgcggcggcgacggagacagttaataatctaagagaacgattaaagcaaagacgtcaacagttgctcgacactgatgttgctacatatgcaagatcacaagggaagagtccagttacttttggtcctacggatctggttt

SEQ ID NO: 50245 - DNA, 343 bp, Gossypium hirsutum
  Clone ID: LIB3197-019-Q1-M1-H2
agccgcccaagagagagtcgagaaaggaaaacagagagcaagagaaaatgaagaccatactctcatcagagaccatggatatccccgatggggtcaacatcaaagtgaaggctaaaatgatcgaggttgaaggtcccaggggtaagcttacacgtaacttcaagcacctcaacctcgatttccacctcaccaaggacgaggagacgggcaagcgtaagctcaggatcgaggcctggttcggtactaggaagaccaacgccgacatccgtaccgccctcagccacatcgagaatgtcatcaccggtgtcaccaaaggttaccggtacaagatgaggttcgggta

SEQ ID NO: 50246 - DNA, 425 bp, Gossypium hirsutum
  Clone ID: LIB3197-019-Q1-M1-H4
aaaaaaactcctactctctcactttgctctcttcttgttcctgtcctctttcaccaaactatcgccgacaacctctccaaaagaatggcatatgaagggattctgttggggatgggtaatcctctccttgacatttcgttagtcgtggacgaagagttcttgaaaaaatatgatatcaagttgaacaatgcaattttagctgaggagaaacaccttcccatgtatcaagaaatggcatccaagcccaatgtagagtatattgctggaggtgctactcaaaattcaatcaaagttgcacagtggatgcttcaaattcctggtgcaactggttacattggctgcattgggaaggacaagtttggggaggaaatgaagaagaactcaaaagctgctggtgtaatgttcaatatcttgaggatgaaact

SEQ ID NO: 50247 - DNA, 404 bp, Gossypium hirsutum
  Clone ID: LIB3197-019-Q1-M1-H6
cccacgcgtccgcttttttttcttttcgactttcggctactgagtcaccaaacgagttaaggaaaagagagacaagtttcaccaaaccatggggtcgatccccgatcctggcgagttgaccgagttaacccagccgagtttcgatgagttccagcgtcaaacgtctctgatgacgagctgtactctcctctggaaagaactgtcggatcacataaattcacttgagcagaacctgataaagcagtcggagaccttgaaacgcaaaatcgaggcactggactcggagaccaaggcttcactcgactcactcaagaagcgggaactcagtatcgaggacagtgtcaagatcgcactcagccgagtcgagttcaacaccaaagctgccatgaggacccttggcgatg

SEQ ID NO: 50248 - DNA, 264 bp, Gossypium hirsutum
  Clone ID: LIB3197-019-Q1-M1-H7
cggacgcgtgggctcaatgatgtgtacaacacacttgctagtattcctacttggagtggtgactctcaccactcccacatttggtacctatgagtcaccaaattatgggaaaccccctactcctgtattcaagcctcccaaggtgaaaccaccaccatatgaacctatgccaccaatgtgtgaaccaccaaaaaaggagaagcctgaacctatgccaccggtttatgcacctccaaagaaagagaagcatggacctcaaccacc

SEQ ID NO: 50249 - DNA, 136 bp, Gossypium hirsutum
  Clone ID: LIB3197-019-Q1-M1-H8
ccgtaccgtacttgtataactctatcacctacttggggttaggctttattattattctaatacaaataggttttcataatttattacataaagcctaacaccaagtaggtgatagagtaatacatgatcggagcgg

SEQ ID NO: 50250 - DNA, 414 bp, Gossypium hirsutum
  Clone ID: LIB3197-019-Q1-M1-H9
ctcccttgtctctgcaaatcagtttttttttcttctcatctcagttctcgcccaccgccgtctccgctgattttttctggatctgacccgtattccgtgtcggatcgttttgacacaggtactgcaccccaaattgccgagtcagggtaacgaagcttaccatcgcccctcttctctctctcgtatctacaaatcaggtttcttcattctcttctcatctcagttctagcccaccgcctccgctggtttttgccggatctgacccgtatcgcgtgtcggatcgtgtcgacacaagtactgcatcccaaattgctccgagcccggagatggctcaaatggctcaaatggtttgtggctcttgtcgtcaattgctttcatatcctgaaggaacctcggcagctaaatgttcatgtt

SEQ ID NO: 50251 - DNA, 384 bp, Gossypium hirsutum
  Clone ID: LIB3197-020-Q1-M1-A10
tttccttttccctctttcgagtccgtgcttttttctagggtttgttctttgatctaactaacgcagattattaagaaaatgtcaagtgctttagagatgtcgctagacgatctcatcaagcgcagccgtaagtctggatccggaaactcccggggtcgaggccgtggatccacggcgggacccgcccgccgcattcctaaccgccgagcgaaccgctccgcaccctataccgctgctaaggcgccggagacgacgtggcagcacgatatgtattcggataagggagcagcgttgcaaggacaagcaggtcgggcctccgcaatagaaactgggacgaagctttatatctctaatttagattatggtgttccaatgacgacatca

SEQ ID NO: 50252 - DNA, 436 bp, Gossypium hirsutum
  Clone ID: LIB3197-020-Q1-M1-A11
cggacgcgtgggcggacgcgtgggcaaaaatggatggttattgtagcagaagggtaatcatgtttttggtgtttgcatttgcagcaataagcagagggtatggacaagaatcaaccactcttgttcctgcaatcatcacctttggtgactctgtggtagatgtgggcaataatgactatctccctaccatcttcaaggctaactatcctccttatggacgggactttgccaacaaaaagcctactgggaggttttgcaatggaaaattagccactgacatcactgctgaaactctggggtttacaacttatccaccagcttaccttagcccagaagcatcagggaagaaccttctgcttggagccaattttgcttcagctggctctggctatgatgacaaagctgccatggtgaatcatgccatcacattgaccca

SEQ ID NO: 50253 - DNA, 445 bp, Gossypium hirsutum
  Clone ID: LIB3197-020-Q1-M1-A12
cccacgcgtccgaaaaaagaagaagcagtgagagagtagcgaagcgcctccctccgcctccaggttgaaggtataatgaaggagatagtgtcgccgggatatcattagaagatagcggctgtgatcaatttgttgagcacaaatttacctgctcgacacaagccaatcaccgtaagaatagttgtaaaggctggttatgaagaaataaagtcctgctcattttatagggagttgtcttttgttggaggtgtcatagtgttaggagagagatatagccagaatgttacctggggattcctcgcatcattcgacatctgatagcgggccttctagaaattctcaagataagcaagaggaagtccgtcgttggtatttttcaagaaaagaaatagaagaaaattccccatcaagaatggatggtattgatttgaagaaagagacatac

SEQ ID NO: 50254 - DNA, 116 bp, Gossypium hirsutum
  Clone ID: LIB3197-020-Q1-M1-A5
cccacccgtccgaaaggcttttgcttttgaaaacccaaattttgctttgcgataatggaggttttttttttaaggtcgaatcaaaggacaaaccgttgaaaaaaagcaaagggttc

SEQ ID NO: 50255 - DNA, 193 bp, Gossypium hirsutum
  Clone ID: LIB3197-020-Q1-M1-A6
tacttggggtaattggctttaacggggcccaatggttaatggtaaaggcattcttggtattgacaacatacttgaaaaaaattaacccggaataacaccattagaattaatccgatgggaactggttccgtgaagccttgggaacgtccgcccggaatattgggaattaaaacaaggttttccttaccttaac

SEQ ID NO: 50256 - DNA, 454 bp, Gossypium hirsutum
  Clone ID: LIB3197-020-Q1-M1-B10
tccggtctttagggctccttccaaagacacggagtcttgatttggatacgctctaacatttgtccgtacagataattcatactaaagatttaaccggaaaccaaagccatggaaatgtccaacgatctcgataggttgctctttttcgagcaagctcgtaaaatttccgaggctacttacgcttccaatcctctcgatgccgataatttgaccagatgggccggagctttactggagttgtctcaattttcaaagcgttccagattctcagaaaatgattcaagatgctatttcgaaactagaggaggctttatctattaaccctagaaagcatgatgctttatggtgcttgggaaatgctcagacttcttttgcgtttctgactaacaaggaggacgaggcaaggccttatttcgaaaaggctgctcaatatttccagcaagcagtcgatgag

SEQ ID NO: 50257 - DNA, 443 bp, Gossypium hirsutum
  Clone ID: LIB3197-020-Q1-M1-B11
caacaatgcctacaagcttttatatctgctatcttttctaactcaaacccttccttattaatcctactccccatatccagttttgccctacagactttaatcactatagatttaagttaactttgtcgactatggctgctgctacgaagcttcaactgtccttggaggaaagcagaattcgaggttcagatttaggcatgtgtcctgatcgggtgaagcctctggcttgggcacctatgaaaggaaaataccgacgaaattgttgtggttgatgtggacacagcagccgcactcatcatggacatgttttctcttcaataggttgtttttgttttatgccaatcaaacatctttctcttctaggccctttggtgttcttttcaacttttaagacttagggatggttatatgtgattgaaatagaagatgcattgaccattttt

SEQ ID NO: 50258 - DNA, 420 bp, Gossypium hirsutum
  Clone ID: LIB3197-020-Q1-M1-B12
cggacgcgtgggttgatacacgccctcatttattttatttttcaaacaaattttcccttcagttttcgtataatttcctaggaaaagaaaaatgagagagtgcatttcagttcacattggtcaggccggtattcaggtcggaaatgcttgctgggaactttactgtctcgagcatggcattcagcctgatggccaaatgccaagtgataagactgttggtggaggagacgatgctttcaacacctttttcagcgaaactggtgccgggaagcacgtgcctcgcgccatctttgttgatctggagcctactgttatcgatgaagtgaggactggtacgtaccgccagttgttccaccctgagcaactcatcagtggcaaagaagatgctgccaacaatttcgctcgtggccattatacaat

SEQ ID NO: 50259 - DNA, 359 bp, Gossypium hirsutum
  Clone ID: LIB3197-020-Q1-M1-B4
gttttggttgctgcctttttctcccacaatagggtcattgcagtgacctccactggccttggtgagcagaaaaactactatccagctcctgaccctcatgctggaactcccccttcaggttcacatggcacaccaccatcttcaggaggtggatcacctccctctcatggaaccccgtcacatggaggtggttaccacccttcaccaacaccatcaacgccttcgggtggaaattgtggaactcccccacatgacccttcaactccatcaacaccatcacacactcctcctcatggtactccaccatcatcttgaggtggtagcccccatcgtatggaggaggcagtcccccatcgtat

SEQ ID NO: 50260 - DNA, 407 bp, Gossypium hirsutum
  Clone ID: LIB3197-020-Q1-M1-B5
gcggagtcctagctgcagggacagaaaaggaacgtttgatatcaggagaagatgcggcttgttgcatttgcttggcaaactacgtggatgacgatgagctgagagagctgccatgtgaccatgtcttccatgtggagtgtgtagataaatggttgaaaatcaatgcctcttgtccgctgtgtaaaagcgagattggtgagagcagcgctgctttaccattggctagagattcgaattaacaaaagcatgggaagaggatgtgcaaggaaaaccggttggagatgggacaatgtgtttaatgcttttggtgctcgactcctgctgcagtttatgcgtgtgtttaacattacattacatgcaaaatccttgaagagctttactttgttctacaaattcttgcatttttt

SEQ ID NO: 50261 - DNA, 439 bp, Gossypium hirsutum; identical to SEQ ID NO: 49272
  Clone ID: LIB3197-020-Q1-M1-C10

SEQ ID NO: 50262 - DNA, 448 bp, Gossypium hirsutum
  Clone ID: LIB3197-020-Q1-M1-C11
cggacgcgtgggttcagtttcagcgtctctgtcaacaacaagttgttttttattttcttcctatttttttttttgcttaaacaaggttaacaagagatggcggatgaggatattcaacctcttgtgtgtgacaatggaactggaatggtcaaggctggttttgctggtgatgatgcccctagggcagtcttccctagtattgtcggtcgtccacgccacacaggtgtcatggttgggatgggtcaaaaggatgcttatgtaggtgatgaagcccagtcaaagagaggtatcctcactttaaagtaccctatcgaacatggcattgtcagcaattgggatgacatggagaagatttggcaccatactttctacaatgagcttcgtgttgcccctgaagagcatccagtacttcttacagaagcaccactcaaccctaaggcgaataggg

SEQ ID NO: 50263 - DNA, 445 bp, Gossypium hirsutum
  Clone ID: LIB3197-020-Q1-M1-C12
aacagccattgggaatcccctgctttaaatttctatattccacaaaaatagcgtaacagagcaagaaacacagagaaaaggaaaaccccataatcatggctcgattaacattggtctcctccatcatccttatgctatgctgctttgccgcagcatcaactttcgaggattccaaccctattcggatggtatccgacggtctccgtggctacgagtcctctgttcttcgtgtcattggccatacacgtcacgctatctccttcgcccgttttgcttacaagcatggaaggaagtacgagacggtggaggaaatgaagcttcggtttcagattttcaaagagaatttggatttgatccgatccactaacaagaaaggcttatcttacactcttgctgttaatcagtttgctgattggagctgggacgagttccaaaaacacaggct

SEQ ID NO: 50264 - DNA, 429 bp, Gossypium hirsutum
  unsure (1)..(429): unsure at all n locations; Clone ID: LIB3197-020-Q1-M1-C4
gcaaagtccactctttgccctcttttactggcttttcttccctatcattttcttctctctctctctttctcccttgaagtgaaggcttctattttatctttggggggatttagagtttcagcacttcagcttggtgtttaaaaaaacaaaagaaagaaaaaaagaaagaaagagaaattgggttctccatggattcatatgaagcaacgaggatagtgttttcgaggatccaaaacttagaccctgaaaatgcttcgaaaatcatgggttatcttcttattcaagaccatggagagaagggaatgatacgtttagccctttggccctgaagctcacatccactctttaatcctcaaagccaaatcccatttgggactntccattttaaacccaccaacgccttctactccctcttntccttctcctttc

SEQ ID NO: 50265 - DNA, 195 bp, Gossypium hirsutum
  Clone ID: LIB3197-020-Q1-M1-C5
cgaatttccgggttgaaccaacccgtccgttcttttaattttccttaaaaatccatttccattcgttattcgtaattcgctatttcgcccatgcctaaaactaaaagggttctttgaaagttctttgttaatggaccatgcttcaaaggggaaaatggtaagttttttcatgattggaaggatcccccaaataat

SEQ ID NO: 50266 - DNA, 175 bp, Gossypium hirsutum
  Clone ID: LIB3197-020-Q1-M1-D10
attcacttcagctactaattttcaagttttctggaacatccaagacacctgggattggtagaacctaacctaaccaaggtgtaccaagcctttgcattgtttgcttaaggaacaatgaataatggggctggaagacagatcaatggttcttccggagaagatgatgatgaaaata

SEQ ID NO: 50267 - DNA, 444 bp, Gossypium hirsutum
  Clone ID: LIB3197-020-Q1-M1-D11
ataaaatgctctgatttttcgaaattgaaaggattatattacgtttgcgatcggacgtttctcatcgggatcaccgccgtttgttcttattcggatcggagcgatttctctctaaatttaaagttcgttattcaataaaattcactttaagcttaataatattgttttcttcatgttgttgcttgaattatttgtttaggtaacgtgccaagcaaatgtttttgtttgaattttagtgattccttgaatttttatttagttttccgtttggtttatgagagaatttgagagaaacggaaggaaaaaaaaagtgattgaaattattcgtttccttctctagaggacaaacatgaacgttttgggaactaggagagctggtagattattgaaacggtggttcctatttagcttaagatcgtgaaattttgattgattgttgatttt

SEQ ID NO: 50268 - DNA, 447 bp, Gossypium hirsutum
  Clone ID: LIB3197-020-Q1-M1-D12
cggacgcgtgggcttgcaagagccgtcgcaaacagaactgatgcttgcttcattcgtgttattggaagtgagctcgttcaaaaatatgttggtgaaggagctagaatggtccgagaactgtttcagatggcacgatcaaagaaagcatgcattgtgttctttgatgaagttgatgcgattgggggtgcacgttttgatgatggtgtaggtggagacaacgaggttcaacgtaccatgcttgaaatcgtgaaccagctcgatggcttcgatgcccgtggaaacatcaaagttctgatggcaacaaacaggccagacacactagaccctgcatcattacgtcccggacgattagatcgtaaggttgagtttggtcttcctgatttagagtctcggacacagatattcaaaatccatacaagaacaatgaattgtgaacgcgatattaga

SEQ ID NO: 50269 - DNA, 443 bp, Gossypium hirsutum
  Clone ID: LIB3197-020-Q1-M1-D5
gaatgaggttgagaacgaggaccttgtttttactctggggaccatagttgacaagtttggggaggaaatggcgccatatgctcttggattgtgtcagaatctggcagctgcattttggaggtgtatgaacaccacagaagctgatgatgaagctgatgatcccggtgcccttgctgcagtcggctgtttgcgtgccataagcacaatacttgaatcagttagcaggcttcctcacttgtttgttcaggttgagccaactttgcttccaatcatgcaaagaatgctgacaactgatggacaagaggtttttgaagaagtctttggagattgtttcatatatgacattcttttctccggctatatccttggaaatgtggagcctttggcctttgatgattgaagcattagctgattgggcaattgacttctttccaaatattttg

SEQ ID NO: 50270 - DNA, 175 bp, Gossypium hirsutum
  Clone ID: LIB3197-020-Q1-M1-D6
aaaaaataagtggttggtggttatttggaaccggaacgaaaaccttaatgggggtttccggaagtcattcccgagtttttaaggggaatcgttaaagttggtgagaaccttccgcctttattggctttgaaaaactggcctctaatattgcttgcttaaccggggaccaatcccg

SEQ ID NO: 50271 - DNA, 431 bp, Gossypium hirsutum
  Clone ID: LIB3197-020-Q1-M1-E10
ctcacctttcttctgagatagcgaccggaactcggtgtttgtcttcccttgaatctatcttctcatcctttcttttctaaaaggaagatggcatttagtgggacgatagataaatgcacggtttatgataagactgttcacttcgttgatttattaactgctgatgggattccttatcataagacctgcttcaaatgcacccattgcaatggcttactcgtgatgagcaactattgttcaatggaaggagtgctttattgcaagcctcactttgaacaactcttcaaagaaactggcacttataccaagaatttccaatccaaaaaatccgacaagccaaatgggcagacaaagactccgaacagacttgcagccttcttctcaggcacacaagataaatgcggagtctgtaacaaaaccgcgtacccctt

SEQ ID NO: 50272 - DNA, 429 bp, Gossypium hirsutum
  Clone ID: LIB3197-020-Q1-M1-E11
accaacttggtcccttacccaagaatacacttcatgctttcttcatacgctccagtcatctccgctgagaaggcttaccatgagcagctatcagttgctgaaatcaccaatagtgcctttgagccctcatctatgatggccaagtgtgatcctcgccatggcaagtatatggcttgctgtttgatgtaccgtggtgatgttgtgcccaaggatgtcaatgctgctgttgccaccatcaagaccaagagaactattcaattcgttgactggtgcccaactggattcaagtgtggtatcaactaccagccaccgactgtcgttcctggtggtgatcttgctaaggtccagagagccgtttgcatgatttccaactcaaccagcgttgctgaggtgttctcccgcattgaccacaagtttgatctcatgtat

SEQ ID NO: 50273 - DNA, 437 bp, Gossypium hirsutum
  Clone ID: LIB3197-020-Q1-M1-E12
ctgactttcacatacatttccatcattcttttttcacactttttttatataattttgatagtataatatggagaaatggtatggggtttcagggctggtgttggttttgagtttgttctttggggttaaaggagaaccccaagtcccatgttacttcatttttggagattcattggtagataatgggaacaataatgaacttcgttcattggctagagctgattacttgccttatgggattgactttgctaatggaccgaccggccggttttcgaacggtcgaactacggtggatgtcatagctgaacttttggggtttgacgattacatccctccatactcaactgcaagtggtagacaaatactgggaggagttaactatgcatctgctgctgctggaatcagagaagaaactggacaacaactgggagctcgga

SEQ ID NO: 50274 - DNA, 187 bp, Gossypium hirsutum
  Clone ID: LIB3197-020-Q1-M1-E4
cgtttgtttaaaattttcgaaaatgataccgacccaaggggacagcccataggtggactggtgggaaggctccaaggaagcaacttgctaccaaggctgcccgtaaatctgccccaaccaccggtggtgtgaagaagcctcatcgctaccggcctggaactgttgcttttcgtgaaattcgaaagta

SEQ ID NO: 50275 - DNA, 377 bp, Gossypium hirsutum
  Clone ID: LIB3197-020-Q1-M1-E5
cttaattttctttgtttctccgtctgcttatccacggccgagaataaatgaaaaaaatgagctccgatgatccgaaccaacccggtctcgtgataactgtgaccgaatccattcgctcgtttcttctctcagcctccaatgaccatcgtctctctaaagaactccgagaactcgctctcactctttcctcagcagccaatgctccgtacaagcagatccgaagcatatggatggaatcagcttttgactccaggcccggattgattcctctcttctccggatctaatttcgttttcaccagtcctaaacccagagagaagagcgaagaattgaaggagaggttaaggaagcttaaagaactagcagagaggaaagag

SEQ ID NO: 50276 - DNA, 252 bp, Gossypium hirsutum
  Clone ID: LIB3197-020-Q1-M1-E6
gttatttttgagggggtcttaataaacgccttcgattaactttcggtttccattaacttctttatttttacgtttttgaatttttagtaagcgaaaatgaaagagtgcatttcagttcacatcggtcaggctggtttccaagtcggaaatgcctgctgggagcttaactgccttgaacatggaatccaccctgatggccaaatgccaagtgacaaaactgtcggaggaggtgataatgcttttaacaccttt

SEQ ID NO: 50277 - DNA, 447 bp, Gossypium hirsutum
  Clone ID: LIB3197-020-Q1-M1-F10
cccacgcgtccggcaaagagtgatgccgaagtgaaagttttgggcacatgggcgagtccattcgtgatgagggtaaggattgccctgaacatcaagtctgtggcctatgaatttcttcaggagaggttatgggaaggcaaaagcgagcttctcctcaaatcaaacccagttcacagaaaggtccctgtcctcattcatggtgatgacaccatctgtgagtctctcattattgtccaatacatcgatgaggtttggccttctgctcccattcttccttctgatccccatgaacgtgccaccgctcgtttttgggctgcttatcttgacgacaagtggttcccttccttgagagctattggtatggctgaaggagaggatgcaattgtctcctttccggtttttctaaataaaagtatggcatttttaccccaaaaaaaaaaacaaaaa

SEQ ID NO: 50278 - DNA, 450 bp, Gossypium hirsutum
  unsure (1)..(450): unsure at all n locations; Clone ID: LIB3197-020-Q1-M1-F11
gttcccgggtattgcggacagaatgagcaaggagctttctgcactcgctcctagcagcatgaagatcaaggttgtcgctccacctgagcgaaagtacagtgtctggatcggaggctcgatcttggcttccctcagcaccttccaacaaatgtggatcgcaaaggctgagtatgatgaatcaggtccagcgatcgtccacaggaaatgcttctaaaatgcccataccatgaaagagagaagtactgtttcattgtttcttgatgcagcttggaactttgctttgttctaatggatttgttatccttctgtgtgttttcatgttggagtgaaacaatgaactttgagaaagccagtgatttgatttttgttccaattctttgaatctcagacaactttttctgatctttntactataatttccatcgcatactgtctccactatgttacatg

SEQ ID NO: 50279 - DNA, 446 bp, Gossypium hirsutum
  unsure (1)..(446): unsure at all n locations; Clone ID: LIB3197-020-Q1-M1-F12
gattaaaagaatatataagaaagaaaagatttccaatctgtaatcagtgctagggttctttggattgatgataatgatggggcgttttgcgcttcttgtcttcttagagttcgcgtcgatgcagcttctctgcattgccgctgatcatgatgctgcgattttttatgattcatttgaagagccattcaatgggcgatggatcgtctctgaaaaagatgattataaaggtatatgggagcattcaaagagtgaagggcacgatgactttgggcttctagtgaccgagaaggcacggaagtacgcaatagtgaaagagctggaggagcctgtgaatctcagggatggaaccactgtgcttcagtacgaggctcgcttccagaatggacttgaatgtggggtgcattacctgaataccttagacctcangaaagctggtggaagcctaa

SEQ ID NO: 50280 - DNA, 376 bp, Gossypium hirsutum
  Clone ID: LIB3197-020-Q1-M1-F4
gcaaaagccaacctgcaatgtgccttctttgggttttcgaaattgggcaattgacctttttttttgcctataaaaacccatcaaaaacagatcaatttttcatcatctcttcatcaactcaaagaaaaaattgagtgtcagtttgaaagtgttcttcagatatggctatgaaacaagttgctaattctgctatcaaagcaattgccaattctgggtcatcctctcttcttaccagacaactccatgcttctccagggagcaaaaagattgttggggtgttttacaaggccaacgagtactttacgaagaatcccaacttttgtggttgtgtggagggagccttggggttgcgcccatggctggaatcacaggggca

SEQ ID NO: 50281 - DNA, 415 bp, Gossypium hirsutum
  Clone ID: LIB3197-020-Q1-M1-F5
cccacgcgtccggccgagtcagaagaagagtgtgctcggcttgtacggctccttcctccaaccgaagctgctctactggattgggcaataaacttaatggctgatgttgtacaagtggaacatttgaacaagatgaatgcacgcaatgttgccatggtgtttgctccaaacatgacacaaatgtccgatcctttaactgcattgatgtatgcagtccaggtgatgaattttctaaagacccttattattagaacacttaaaggaagagaagattctatggtagactctgctcctgtctctcgcttagagccgtctgataagaatggacagcaaagctcttcacaactactcaaagatgccagtgaggaggttaaaaacgaaagcaaaggagagaaagcttttgtgggtcaagaac

SEQ ID NO: 50282 - DNA, 103 bp, Gossypium hirsutum
  Clone ID: LIB3197-020-Q1-M1-F6
aagccacaaccaaatacccttttgaaacctaacccaccccaaattccaaaaccggcctccgttttaaagggcgatgatttttccatttggcccacatttaaac

SEQ ID NO: 50283 - DNA, 401 bp, Gossypium hirsutum
  unsure (1)..(401): unsure at all n locations; Clone ID: LIB3197-020-Q1-M1-G10
aaaatattaagaggatatttggtgaagtgggaaggataaagaaaatatcagttcgtgatccacatgctgttgaagagacaaagaaaactggtagagccgatatattgatcagtagtaagttacacgcactggtggagtatgagactattgaggctgctgaaaaagctgtggctactttgaacgatgaacatgactggagaaatggcatgcatgttaagcttcttgagcgaaagggtaagcatggacagcgaaagcaagcttggaggggacctgctcatgaaaaaaacatcaatgctcaggtatctgatcaaactggaaccgaggagaaaaatgcttcaagtgagtatcatgaagatataccagatgatgaggatggngagcatttgtccaaagagaaaaat

SEQ ID NO: 50284 - DNA, 415 bp, Gossypium hirsutum
  Clone ID: LIB3197-020-Q1-M1-G11
aaaaaagtcccagaagctgaagactagtttgaaacgctccccacacaccacaagcaagccacacccaattacaccgaatcagctatgaggctatcggccctagggttcttctgtttgttcttcgctccctctctctgcagggtaccatctgaaacacatgtaaagactgaaccagaacatgctagcaccccaccaagaggttggaactcttatgattccttttgctggaccatatccgaggaagaattcttgcaaaatgctgaaattgtttctaaccgtcttaagccgcatggatatgagtatgctgtggtggattacctttggtatataaggaaggtggaaggggcttacactgattctattggatttgatgtgattgatgaatgggggaggccaattcctgacccaggaagat

SEQ ID NO: 50285 - DNA, 355 bp, Gossypium hirsutum
  Clone ID: LIB3197-020-Q1-M1-G12
gccaagccttataggcttgtataagaaagtaagtaccctccagatttggccagtctttttagatgagaactttattaaaattgtttgtacattgataaatttcagatctgggaggcttctttcagctgtccatcatgattttcatctggtgctaggaatttgattaagcgtattcttgatccaaaccctcttacccgtataactattcctgaaattctacaagatgaatggttcaagaaagggtacaagccaccaaaatttgagcaagatgaggatgtaaatcttgatgataatatcttgtattttacatggttatgatatctttatatttaatctaatttttattatttatttt

SEQ ID NO: 50286 - DNA, 349 bp, Gossypium hirsutum
  Clone ID: LIB3197-020-Q1-M1-G4
gggaaagattatgtgggttggaattatgaaaagactggaaatcctgtgtatctgcatattaagcaaacgaaaaagttggtttctgaagataggcctttgaagaaacccactctgttggctattggtgttgatggtggatttgacaacaatgaactagaatatgaagaaactcacaaaattgtcattttgcctagctatgcaactcttccttttccatctgtggagttgcctgagaaggtaaggttggcagttgatgctattttaatggctgagggtgctgaacggaaagagcaagttgcagcctggacagctgataagaagcaaataagtgcatatgcaatggagttgc

SEQ ID NO: 50287 - DNA, 382 bp, Gossypium hirsutum
  Clone ID: LIB3197-020-Q1-M1-G5
aacaaaaatggctgagttgaaatctgacaatttgcttgagatgatgaagtttcatttgggtactgatgctggtaaagagcttactaagaagattggtcttgtttaccaactcaatattgcccccaagaaattgggggttgatgaggttacttacgttgttgatctcaagaaaggagatgttatcaaaggtgaatatgaagggggaaagcctgatgttatattttcattcaaggatgatgattttcttaagattgccactgggaagatgaatccccaggttgcttttatgaggggtttaatgaagattaaggggagcttgagtttagctcagaaattcactcctgatattttcccaaagcctgctaagatgtgaactaagatg

SEQ ID NO: 50288 - DNA, 228 bp, Gossypium hirsutum
  Clone ID: LIB3197-020-Q1-M1-G6
gtcccgggggaaccccgtggggcttttcatttcttttgctgttgaaagtagtgatatctatagcatacaaagatggagaggcaaaagaaacaagcacgtttgtttgttgatgtgggttttggttgctgcctttttctcccacaataaggtcattgcagagacctccactggccttggtgagcagaaaaactactatccagctcctgaccctcatgctggaactccccc

SEQ ID NO: 50289 - DNA, 381 bp, Gossypium hirsutum
  Clone ID: LIB3197-020-Q1-M1-G9
ggcaaagagtgatgccgaagtgaaagttttgggcacatgggcgagtccattcgtgatgagggtaaggattgccctgaacatcaagtctgtggcctatgaatttcttcaggagaggttatgggaaggcaaaagcgagcttctcctcaaatcaaacccagttcacagaaaggtccctgtcctcattcatggtgatgacaccatctgtgagtctctcattattgtccaatacatcgatgaggtttggccttctgctcccattcttccttctgatccccatgaacgtgccaccgctcgtttttgggctgcttatcttgacgacaaggtatatgcatttgtgctttattcatataaaaagaagttattttttatgtgataattttt

SEQ ID NO: 50290 - DNA, 406 bp, Gossypium hirsutum
  Clone ID: LIB3197-020-Q1-M1-H10
gttcagttttggaactgaagtgttcagaggggtttcttactctattgtggaaaaaaaagaggattttggaggttataattagacaagaagatgaattctggttctaaacaaggtttgttttgtctaaaatggccttgggatgttaacaaacagtctaaaagttccaatctttgtacctttgaaggtccttggttattcaaatctatgcaaaatcttggttcctttgttctaaattcattcaattcagtttcgggtttaaggtttagtaatttaaaccctacccaaatagcttttggggttagtcaaaatgagaacttgaagtttaaaaggaaaccattgagtcctgatgaacaaggggaagctgaacagagggcttttgcatcggcattggctagtgggaaatctg

SEQ ID NO: 50291 - DNA, 334 bp, Gossypium hirsutum
  unsure (1)..(334): unsure at all n locations; Clone ID: LIB3197-020-Q1-M1-H11
attttccttatagattgtaaaaagttgggtaaagcaattaacacgtcaaaaagggctacacagatcaaatggtggaagaagcaaatgctgtcattttcacttttggatcttaccggttaagggtgcatggacctggggctgacataaacaccctgtgtgttgggccatcttatgtgaaccgtgaggaagatttcttcatcattttgcgtgatattttggctgaaatggaagaagttactgaacttcaacccgttccagatgctcatgtcccagtaatgaaatttaagttccaagggatatcaatngatcttctttatgctagtatttctctttt

SEQ ID NO: 50292 - DNA, 410 bp, Gossypium hirsutum
  unsure (1)..(410): unsure at all n locations; Clone ID: LIB3197-020-Q1-M1-H12
cggacgcgtgggcaagcagaagcttttggaattagaagctatttcaaaatagcactttcaaatgcataataagaaagaagcgtgcagaaactttcagcgcggcagctgtcaatatggtgaaaggtgcaagcagtggtgccccttcattgcggcagcctgacaatcagcctcaggcaacaaaccatagatgcaatgatcctgagtcctgcaaacgtattattgctgaagattttgagcacgagagacccttgtggaagcttacatgctacagccattggaaaaattccccttgcgatattgtcggtgatgtcagctatgaagaattgcgggcagcagcttatgatgatgcaaaacgtgggttaagcttgcaatctattattgagcgagagaggaanttactgaattcaaag

SEQ ID NO: 50293 - DNA, 167 bp, Gossypium hirsutum
  Clone ID: LIB3197-020-Q1-M1-H2
gcaaaacttggccaaggccattttcaccgagaaaggagggaccaccaaggaaaaccagagcaacaactactacaacggcaacaatggttacaacaatgccgagaagcagggcatgagcgatactaggtacttggagaatggaaagtactactatgacgtcaagagtg

SEQ ID NO: 50294 - DNA, 425 bp, Gossypium hirsutum
  Clone ID: LIB3197-020-Q1-M1-H5
caagatcagaataagaaaaacgctgcttgcaggtatgtcatcatccgataagccagaattagttgaaagggatgttaaggacaaggtggatgacaaagaagacaacagtggatttatagacaaggtcaagggtttcattcatgacattggtgagaagatcgaggaaacaatcggctttggcaagcctactgcagatgtagctgagattcacctcccttgtatcaatcttgagaaagcagaaattgtcgttgatgtcctcataaagaacccaaaccctgttccaatccccctcgtcgacattgactacctcattgaaagtgatggtagaaaactcctttcaggcttgattccagatgctggaaccatccatgctcatggtgaggagactgtcaaaataccagtactttgtatatgatgatatcaaa

SEQ ID NO: 50295 - DNA, 379 bp, Gossypium hirsutum
  Clone ID: LIB3197-020-Q1-M1-H6
acccactcgtcccaagaaaccagagacgggaaaaaaaacaaaagcttacagaaaaggagaggagacacgaacccagaattaaagaaaaactacagcaaagaaaggttctgtgtctcctgttattgcggttcgaagagatgatggcaatggaatacgagagtaacaattggatttgggacggggtgtattactgcccacgtctctttggtggcctaatgctaacggctgccttgcttggtttgtctaccacttatttcggtggaattggactgttcccattgtcatatgtttggtcagattcagggatcttccacaagaagaagtgtgagaagaagcgcattcgagtttacatggatgggtgctttgatctcatgcatta

SEQ ID NO: 50296 - DNA, 206 bp, Gossypium hirsutum
  Clone ID: LIB3197-020-Q1-M1-H7
cggacgcgtgggcttggaggaaaggaggattaaggaccttgtgaagaagcactctgaattcattagctatccgatatacctctggaccgagaagacaaccgagaaagaaattaatgacgatgaggaagatgaacccaaaaaagatgaggaaggaaatgtctaggatgttgaagaggatgagtcgaaatccgagaagaagaagaaga

SEQ ID NO: 50297 - DNA, 428 bp, Gossypium hirsutum
  Clone ID: LIB3197-020-Q1-M1-H8
aacgctctctcatcctgcttctggtcaagccaatctcaaaagactccccttttagctcacagctctctcgagttctgtaatgggtaaggagaaggttcacatcaacattgtggtcatcggccatgtcgactctgggaagtctacaaccactggtcatttgatctacaagcttggtggtattgacaagcgtgtgattgagaggtttgagaaggaggctgctgagatgaacaaaaggtcatttaagtatgcatgggtgcttgacaagcttaaggccgaacgtgaacgtggtattaccatcgatattgccctctggaagtttgaaactaccaaatactactgcactgtcattgatgcccctggacaccgtgacttcatcaagaacatgattactggtacctcacaggctgactgtgctgttctcattatcg

SEQ ID NO: 50298 - DNA, 407 bp, Gossypium hirsutum
  Clone ID: LIB3197-020-Q1-M1-H9
cccacgcgtccgtcttcccttccttgtatctttattttctcgcctttgacgaggagccgacgctaccatggttcacgtcagtttctaccgcaactatgggaagacctttaagaagccacgatgtccgtatgagaaggaacgattggatgctgagttgaggcttgtaggagagtatgggctccgatgcaagagggagctgtggagggttcagtatgctttgagccgcatccgtaatgctgctagggaccttctcactcttgatgagaagaaccctcgtcgtatttttgaaggtgaagcccttcttcgtaggatgaacaggtatggacttttggatgagagccagaacaagcttgattatgtcttggctttgactgttgaaaacttccttgagcgtcgtttgcaaactc

SEQ ID NO: 50299 - DNA, 333 bp, Gossypium hirsutum
  Clone ID: LIB3197-021-Q1-M1-A1
gctctcttttccttgtcaccaaaaaacatctttctggtcaattcaatcctccttttttctattcaaccataatgtcttgcttcattagcaaatacgccgatgagttggctaaaaacgctgcttacattggcacccctggaaagggtatccttgctgctgatgaatccaccggcaccattggcaagcgtctttcaagcattaatgtagaaaatattgaagaaaacaggcgtgctctccgtgagctcctcttcactgctccaggagctcttcagtacctcagtgggttattctcttcgaggaaaccctttatcaaaaaaccgcttcgggcaagcc

SEQ ID NO: 50300 - DNA, 205 bp, Gossypium hirsutum
  Clone ID: LIB3197-021-Q1-M1-A10
gaatatggtgggggcttcgtctttgcatccaagactcctctctttttttgttggtgatcgtttagctcaatctagacaaccacttgctcagctatttcattacaacccaggtcgtatgcatatatgattgctattatccataacgttttctggcttaaccaatattttatttaatagaaggtacaatttggacgaaattccagat

SEQ ID NO: 50301 - DNA, 305 bp, Gossypium hirsutum
  Clone ID: LIB3197-021-Q1-M1-A11
aagcaaaggcaatagaaaatggcagaaaacgaagacattcagcctcttgtttgtgacaatgggactggaatggtcaaggctggatttgctggagatgatgctccaagagctgtattccctagcattgttggtcgcccacgtcacactggtgtgatggtcggtatgggccaaaaggatgcttatgtgggagatgaagctcaatcgaaaagaggtattttgactttaaagtacccaaattgagcatggtattgttagcaattgggatgacatggagaaaatctggcatcataccttctacaatgagc

SEQ ID NO: 50302 - DNA, 393 bp, Gossypium hirsutum
  Clone ID: LIB3197-021-Q1-M1-A12
catttgatccccccttttctgttgccggaactgagagtcccagatccgattaaaaaaaatgaaggtgatagataagatccagtctttctcacaggaccaagggaaagtggttttttcctttgagttcttccctccaaagactgaggatggagtggacaacctgtttgagagaatggatcgaatggtggctcataatccatctttttgtgacatcacatggggtgctggtggttccactgcggatctcactttggacattgctaacaagatgcaaaacatgatatgtgtggaaacaatgatgcatctcacttgcaccaacatgcctgttgagaaaattgaccatgctcttgagaccattaagtctaatggcattcaaaatgttcttgcccttag

SEQ ID NO: 50303 - DNA, 408 bp, Gossypium hirsutum
  Clone ID: LIB3197-021-Q1-M1-A2
gcagggctctatgactagggtttcgaactttccttgattttttttttctgaaatcgctgctttcgaaggcaatatgagacccattttctgtggaaactttgagtatgatgcacgtcagtctgatttggaacgactcttcagaaaatttgggagaatcgaaagagtagatatgaagtctggatttgctttcatctatatggaagatgagagagatgctgaagatgccatccgagcacttgatcgaacagaatttggtcagaaaggacgtaggcttcgtgttgaatggacaaagcatgagcgtggcattagaaggcctgagggtgggggtggtggatcaagaagatctgcagcaaacacaagaccttcaaagactttatttgtcatcaattttgatccttatcacactcg

SEQ ID NO: 50304 - DNA, 158 bp, Gossypium hirsutum
  Clone ID: LIB3197-021-Q1-M1-A3
acgcatgttttagttcaccaactcaccctaggtgagtttagatacgctcatgcaggaattgacgtagaatggaaggcggaggatcaccatatgctgcagactccttggaggcctaggctgatcctttactaccttatcaatattcagttcgggaaact

SEQ ID NO: 50305 - DNA, 208 bp, Gossypium hirsutum
  Clone ID: LIB3197-021-Q1-M1-A4
aaagaatcaaatggaatgaaatgaacgtcgactgagtggatttcagcaatgaaaagggtcttctcggcgcccggagattacatctacttcaagtcccaagtccctttttacaagatccccattggcaccaaacaatggcgggattattattttggtcccaaagggggtacttcaattatttttcttccttgaacctgaaggaccggaa

SEQ ID NO: 50306 - DNA, 350 bp, Gossypium hirsutum
  Clone ID: LIB3197-021-Q1-M1-A5
gaccacttcttcccttccattttactttgttttagttgccataacgtcaccttccaatacaacccacaatgaggcaacaatatgtcttcactactctcacgttgctcatcctgttttccctcagttgttcaacaacattagcccaatctccggcactggccccggcaccttctggcccgacaaacgtcaccaagatcctcgaaaaagccggtcaattcaccctcttcattcgtcttctaaagtccactcaagtggccaaccagctgctcggtcagctcaacaattccaacaatggtatgaccgtttttgcaccaacggacaatgctttctccagccttaaatcgggcaca

SEQ ID NO: 50307 - DNA, 401 bp, Gossypium hirsutum
  Clone ID: LIB3197-021-Q1-M1-A6
aaaatactttgctgcaaattctcctaattttttcagaaaatctaacacaggggaaaaaatgagagagatccttcatgttcaaggtggacaatgtgggaaccaaatcggttccaagttttgggaggttgtttgcgatgagcacggcatagatccaactggaaggtacattggttcctcggatctgcagttggagcgtgttaatgtttactataacgaggcttcatgtggtcgctttgttcctcgtgctgtgctcatggacttggagcctggtacgatggacagtgtccgaactggtccttacggccagattttcaggccagacaactttgtttttggacaatccggtgctggaaacaattgggccaagggccattacactgaaggagccgagcttatcgatg

SEQ ID NO: 50308 - DNA, 408 bp, Gossypium hirsutum
  Clone ID: LIB3197-021-Q1-M1-A7
ggggtcatgacgaaatcaaagttaaacacttcaactacgataaagcatttccatgttttgcttatcagcgtctaaaaactcgccaccatatctttcattgaggtctacactattcttgttaccaaacaaccccgctaatcggcggttatccccgccactgatcgctccgccggttctttgcttgcggtgacgcctcggaagcggttctctctatctgttggtcgtcgaatttcgaaacttcttcaccatggctggcgctgaggattttgttaaaggaaatgtctatcccaacggcgtcgcaatcattactctcgaccgtcccaaagccctcaacgccatgaatttagatatggatgtcaagtacaaacaaattcttgaagaatgggaatcggatccaaaggtcaaatg

SEQ ID NO: 50309 - DNA, 170 bp, Gossypium hirsutum
  unsure (1)..(170): unsure at all n locations; Clone ID: LIB3197-021-Q1-M1-A8
cttaaacaagatctgngcaaaatggcggatgctgaaaactctcttctaggagaaaccacttgtggttctttattgcagaaactgcaggaaatttgggatgaagtgggtgaaagtgatgaaaagagagacaagatgcttcttcaaatagaacaagagtgcttggatgtgta

SEQ ID NO: 50310 - DNA, 378 bp, Gossypium hirsutum
  Clone ID: LIB3197-021-Q1-M1-A9
aaagtaggtaattggagagtagtgcataggctcaggcaatcatggccatctcaagtgtttgtccaactgaggatgctgttcaagcatttttggagcacttggttgatcctttgctaccttctaaatattcagttcgggaaactccatcgttagctactcaggaattagtagccaaacaggtacatgctgttgtgttactatacaactatttcctaaggaaaagacatccggacttaaggtatctagattttgagaatttttgcaagtgggctttagttttgaagccaaatttgaagtcacatatgaagctcatggtaaggactgatgatactgagttgagtgaagttgaaagtcagttttcactccttgagaaagcca

SEQ ID NO: 50311 - DNA, 410 bp, Gossypium hirsutum
  Clone ID: LIB3197-021-Q1-M1-B1
cccacgcgtccgggttcagaaaagaaaaatggccaccattgatgttcctgagcaggtttcggttcttgcagatgcaaaagctcttaaaaaggcttgtaaaggatgggggacagatgagaaggcaataatttcagtgttgggtcacagaaatgcagttcaaaggaagcaaatcaggcttgcttatgaagacctttaccaggaagatctcatcaagcgtcttgaatcagagctttctggtgatttcgagaaagcagtgtatcgttggatattggatccagcagaccgagatgccgtgttagctaatgttgccataaagaaattaagccctgatcaccatgtgatcgttgaaatttcatgcaccagatcccctgaagagctcttggctgtgaggagagcttatcaggctcgat

SEQ ID NO: 50312 - DNA, 401 bp, Gossypium hirsutum
  Clone ID: LIB3197-021-Q1-M1-B10
caaatttccaaacactagttttcttttactgcattttgctaagacaagccgagaaacaaagtgaaatattgctgagagtttgtggagatgagtgccttgagtgagggtcttacccaaattgtgatccctttagcttccttggtgggcattggttttgctttgcttcaatggtttttggtctctagggtgaagctattatcacaggattcaagcaatggatataaacaaaaactgattgaatctgatgaagaagaagagggtattaacaatcttgagatttccatcaagtgtactgagattcaacatgccatttctgttggtgcaacctctttcctctttactgaatacaagtatcttggtatcttcatgtgtgtatttggtgctatcatattcctcttcct

SEQ ID NO: 50313 - DNA, 405 bp, Gossypium hirsutum
  Clone ID: LIB3197-021-Q1-M1-B11
ccggtgatagagggagacgagaaaggggaaacaacaatggtgtctttgaagcttcagaagcggcttgccgctagcgtcctcaagtgtggtcgtggcaaggtctggttggaccctaatgaaatcaatgaaatctccatggccaattccaggcagaatgttaggaaactggtgaaggacggttttatcatcaggaagcctacaaagattcactcccgttcacgtgcatgtaggatgaaggaggccaagagaaagggccgacactctggatacggtaagaggaagggtacaagagaggcaaggttgccgacaaaaatcctttggatgaagagaatgcgtgtcctgaggcgattgctttgtaagtatagagaatccaagaagatcgacaagcacatgtaccatgacatg

SEQ ID NO: 50314 - DNA, 393 bp, Gossypium hirsutum
  Clone ID: LIB3197-021-Q1-M1-B12
cttaacaaagcaaaggagaatctctctaagctggaggagagatctaaattgaaacctgggattcccaagaaggatgggaagattgactacactcaagacttctttgcccgccaagcttttttgacagtttctgggcaactgcaggttgaaacatatgcttgtgctgttagtaacgtgtatacatttgggccaacttttcgggctgaacactctcacacttcaaggcatttggcagaattttggatggtagagcctgaaatagcatttgcagatctacaggatgacataactgtgccgaggcttatgtgaagtatatgtgcaattggttgcttgataaatgccttgacgatatgcaattcatggctaaaagttatgataaaggttgcattgatc

SEQ ID NO: 50315 - DNA, 403 bp, Gossypium hirsutum
  Clone ID: LIB3197-021-Q1-M1-B3
cagctttatcagcaaatttaaaaataataaaaataaagtatgaatttggattggaacgaacaaaataagattttcatttcatttcatttctgagatcgtattgtgttgaaacaaattgcgaacaagctttaaaaaatatctgttgaaacaggaaatcacgatcatcagctgattaaaactgtatcgaactttgaaagcagtatctagagattcggatatttgtttctctttcttttcttcgccgttatggaagctgatgtatctatttcctcctaaggccctcatcacaatcaaatctctttcgttccacagagagctagggttttctttttcaatcgaatttcttttgggtttttaatttttcagttttcggatgaagatgaatcgagttgtggttttatta

SEQ ID NO: 50316 - DNA, 400 bp, Gossypium hirsutum
  Clone ID: LIB3197-021-Q1-M1-B4
gtggccagttctcttggaacatatttcttatctgggatttctttaatatcccgggatatgctcaatgtgtacagaatgtacagtgagcttatatcaagtagtattgcagaaggtgtaccctttgcttcaaaaacatcctatgtgaaacttctacgatctgttaagagggagactcttaagctcattgagacatttttagataaggcagaagatcaaccgcaaattgggaaacaatttgtgcccccaatgatggatccagttcttggtgattatgctaggaatttgccagatgctagagagtctgaagttttatcactttttgctacaataataaacaagtacaaagctgcaatgatagatgatgttccccgtatatttgaagctgttttccagtgcacgc

SEQ ID NO: 50317 - DNA, 406 bp, Gossypium hirsutum
  Clone ID: LIB3197-021-Q1-M1-B5
gatagcgatatgaccgagggtcaaactaatgatttctcgagagacatagcggagttgcggaagcggcagaagacggggatcgtgagcgagaggaagaggaaggatagggaggaaggtggtggaggagaggacggggatggaggcggcggagaagaagagctgagtggtgatggtggatcaagcggagtcgatatggacaaggacttgaaaagaatgaaggcgaatttcgatgagttgtgtggtgaagataagattctggtgtttttcaagagattgttgaatgagtggaatcaagagctggatgagatgggtgaggctgagaaaaggacggcgaaaggcaagtccatggtcgccacgtttaagcagtgcgctcgttatttgaatcccttgttcaagttttgtagga

SEQ ID NO: 50318 - DNA, 409 bp, Gossypium hirsutum
  Clone ID: LIB3197-021-Q1-M1-B6
ctttcgctttctcgcctccgagaagaagccgacgccgccatggttcacgtcagtttctaccgcaattatgggaagacatttaagaagccaaggcgtccatacgagaaggaacgtttggatgctgagttgaggcttgtaggagaatatggtctccgatgtaagagggagttgtggagggttcaatatgctttgagtcgaatcagaaatgctgctagggatcttcttactcttgatgagaagaaccctcgtcgtattttcgaaggtgaagctcttcttcgtaggatgaacaggtatggacttttggatgagagtcagaacaagctcgattatgtcttggctttgaccgttgagaacttccttggacgccgctttgcaacacttgtgttcaagactggtatggccaagtcaa

SEQ ID NO: 50319 - DNA, 404 bp, Gossypium hirsutum
  Clone ID: LIB3197-021-Q1-M1-B7
gttattttgccttttcgctatcgtctttgcctatcaactccacggcgcagatccgaggagtctctatttctcaatccaaacaaccgctctaaacactctcttcttttattgctcctactcttccagtcatggcaggtttggcaccagaaggatcccaatttgatgctcgtcaatatgaccagaaaatgactgagctgctccagaccgatggagatgactttttcacaagttatgatgaagtttatgacagttttgatgcaatgggacttcaagagaaccttctgaggggtatctatgcatatggttttgagaagccttctgctattcagcaaagaggaattgtaccattttgcaagggtcttgatgtgattcaacaggcacaatccggaactgggaaaacagcg

SEQ ID NO: 50320 - DNA, 403 bp, Gossypium hirsutum
  Clone ID: LIB3197-021-Q1-M1-B8
cggacgcgtgggctgtgaacaccaaggcaggtctcaaacaagaaaactagtttttatttcaatccaagtttatgagtataggttttgcatggggttctattaaaaacctaaacaaatttcattcaatagctatttgatctcatcataaggaattcagcaagcaatgttatgatggagatagaatccaataaaccagcagggaatgggatggtgatcggtggtttaagtcctttaagtgaaaccttatggagagagaagactaacaccgagtttgtaggagatgtatcagccagactcacttggaaagatctcaccgtaatggtaactctcaacaatggtgaaactcaaaaagtacttgaaggactcactggttatgctgaaccaggtactttaacagctctaa

SEQ ID NO: 50321 - DNA, 403 bp, Gossypium hirsutum
  Clone ID: LIB3197-021-Q1-M1-B9
gtggtttaagggatttttttcattcgtttggtctcacgctcgattaccttacaaaaagagaaaatgaccaagtgttacccaactgtgagcgaggaataccagaagtcagttgaaaaggccaagaggaagctcagaggtctcatcgctgagaagaactgtgctccactcatgctccgtttagcgtggcactcagctggaacttttgatgttaagaccaagaccggaggtccattcggaaccatgaagcatcctgctgagctcgcacatgctgctaacaacggcctagatatcgccgtcagacttctcgagccgatcaaggagcagttccctaacctcacctacgctgacttctatcagcttgctggtgtcgttgccgttgagattactggtggacctgaaattc

SEQ ID NO: 50322 - DNA, 406 bp, Gossypium hirsutum
  Clone ID: LIB3197-021-Q1-M1-C1
ctcatttcaagggagagagtgtatcagtgtttcttcggctctttacttaatttctctccgccatggctctctccgtcgagaaaaccgccgccggccgtgagtacaaggtcaaagacatgtctcaggctgacttcggtcgtctcgagatcgagttagctgaggttgaaatgcctggtttaatggcttgtagaaccgagttcggccctgcccaacctttcaaaggagccaaaattactggttctcttcacatgaccatccaaaccgccgttcttattgaaacccttaccgccctcggagctgaagtccgttggtgttcttgcaacattttctctacccaagaccacgctgccgctgccatcgctcgtgactccgccgctgttttcgcttggaaaggggagaccctcca

SEQ ID NO: 50323 - DNA, 355 bp, Gossypium hirsutum
  Clone ID: LIB3197-021-Q1-M1-C10
acaatagctatattcgtaaagtccatagcacgaagctgttgaatgcttcatctaaatttctatttcgtgttacccttcttattgctttagttttgatcttgtttttcaccattaactaccctccactttcggataatacccacagtgcacctcaccatcaccaccgtcatagctttctttcaacttcacttttctccggttcttccctcgttggtggtgcggcgtgggagaaacaagtccgtcactcttctactccacgtagagttaatgggttttccgttttggtcaccggcgccgcttggttcatcggttctcactgttcacttgctttggaaaaacccggcgattggggttt

SEQ ID NO: 50324 - DNA, 409 bp, Gossypium hirsutum
  Clone ID: LIB3197-021-Q1-M1-C11
tttctacttaatctctcattgcttacttatattgtaagtgtgaccaagtaaaccaagtacagaagctcaatgcccaagatggaggccagcagcagcacctcccatgacccagcattgttccatgctcccttgctataccaccctcggagaaggagcagcagacccttaaagggtttcgcagtgataattgggtccgtcgttttcctactctcactggtcacattaatcgttaaccaaagcccggagccattagcaagtaaccccagtagtgtaacggaggcagggtcgtattcaatagcggcgcagccaagagggatagctgaaggtgtttcagccaagtcaaacccatcactttttgacaaagttgggtttaattggacaaacgctatgttttactggcaaagaactg

SEQ ID NO: 50325 - DNA, 401 bp, Gossypium hirsutum
  Clone ID: LIB3197-021-Q1-M1-C12
agtccccaaatggattctccctttccgttcaaatggcaacccctcccctttcatcccctacttatctcaccaccaatttaggcgtcggctacgccatcgtcgtcgccctcggcttcctcctcctcctctccactctcctcctcgcttcctacatttgcttccgctcttcctcaccccttccacctcgtgccatttccccaaaccccatttcaacacccaccgccgccaactccgacggtatcgtcctccccaggattgttttcatcggcgaagaagaccatgaaaacgacgaggaaaacgtcgtcgtctttgggcttgatcgtgccgtcataaactcttaccccaagttccggttcagcaaaaaggaggtgtctacggcggtggaggtgacgggttctagt

SEQ ID NO: 50326 - DNA, 400 bp, Gossypium hirsutum
  Clone ID: LIB3197-021-Q1-M1-C2
gtttcacatgcacgttacagtaagagtaacccaatagcaagatggcatgtttgtcaaggttcaattaatagcattgctttctcccatgatggggcatacttagcaactgttggaagagatggctatctgcgagtttttgactattctaaagaacagctcgtatgtggtggcaaaagctattatggtgctctactatgttgcgcttggagtatggatgggaaatatattctgaccggaggtgaagatgacttggttcaagtttggagtatggaagatcgaaaggttgtggcatggggtgaggggcacaactcatgggttagtggagtggcatttgattcgtattggtcatcacctaattctgatggcacaagggagactgtgatgtaccggtttggttctg

SEQ ID NO: 50327 - DNA, 274 bp, Gossypium hirsutum
  Clone ID: LIB3197-021-Q1-M1-C3
acgtttaacatgcacgttacagtaatattaacccaatagcaagatggcataattgggaaggttcaattaataacaatgctttatcccatgatggggcatacttagcaactgattaaagacatagccatctgcggagaatagacacattcaaaaaacggctattatggagcaactgcagatatttgggcttgtggagtaattcttcttgaactgcttgctggctacttaccatttgatgatcgtaaaattgtgtgtttatacaaaaaggtttgca

SEQ ID NO: 50328 - DNA, 193 bp, Gossypium hirsutum
  Clone ID: LIB3197-021-Q1-M1-C4
gcgtttaacaaagcaaaggagaatctctctaagctggaggagagatctaaattgaaacctgggattcccaagaaggatgggaagattgactaccctcaagacttctttgcccggcaagcttttttgacagattctgggcaactggcggttgaaacatatgcctgtgctgatagtaacgtgtatacatttgggc

SEQ ID NO: 50329 - DNA, 143 bp, Gossypium hirsutum
  Clone ID: LIB3197-021-Q1-M1-C5
ctttaacattcaccatataagcataggtaaaccaaaggtggaagacataggaggtggggagaattaaacagcacttattctggacatgagagccggatcatcagacactattgaaaaagattgatctctgataccttaagact

SEQ ID NO: 50330 - DNA, 410 bp, Gossypium hirsutum
  Clone ID: LIB3197-021-Q1-M1-C6
cttttgccatcataaaaacaccctgtcgaaacctctccaactcacccaaggaaaccgaagcattacgaggagaacacaaaagaacaggagaaacattacgatccctcctaattccaataatgcctgccactaaatgttgcatcgttttcatctgtctcctcttgatgttttcttcttcttgggatgttgcaatgggtggtcggtacatcccatcgagtgttccgagcacaatgaggcctgcatccgtggattacgtgaagatgaaccctcaagtgctactgaatcacaagcacaaggtttcccatgagaaggaagtaaagggttgcatgccaaaagggtttcgccgttcatcagctccaagccgctatgttaactatcaaactcttggttcttcttgtgctacaaaagcg

SEQ ID NO: 50331 - DNA, 402 bp, Gossypium hirsutum
  Clone ID: LIB3197-021-Q1-M1-C7
gattagggttccttcattattctatttaggaaattttaattttcaacttgttttcgtttattctcttcgattttgggttaaaccctagaaggctcctcgcgaaaacgtcagatggcaactttagctgattcattccttgcggaccttgatgaattatcagacaacgaagccgatgttctggaggaagaaaataatgatgtcgcaaacatggaagaagatattgatggtgacctcgcggatatcgaaacgcttaactacgatgatctggacagtgtttccaaattgcaaaaaagtcagagatacattgatattatgcagaaagtggaagatgcgctcgagaagggttctcatatatcaaatcagggcatggtactggaagatgatcctgagtatcagctgatt

SEQ ID NO: 50332 - DNA, 391 bp, Gossypium hirsutum
  Clone ID: LIB3197-021-Q1-M1-C8
aatctttcattctttgctgttgaagtagtgggatctatagcatacagagatggagaggcaaagaatcaagcaggtttgtttgttgatgtgggttttggttgctgcctttttctcccacaatagggtcattgcattgacctccactggccttggtgagcaaaaaaactactatccagctcctgaccctcatgctggaactcccccttcaggttcacatggcacaccaccatctttaggaggtggatcacctccttctcatggaaccccgtcacatggaggtggtttccaccctttaccaacaccattaacgcctttggattggaaattgtggaactcccccacatgaccctttatcttcataaacaccatcacacacgttctctgatggtac

SEQ ID NO: 50333 - DNA, 399 bp, Gossypium hirsutum
  Clone ID: LIB3197-021-Q1-M1-C9
cggacgcgtggggttctaaactgtttaaattaacaagagaacaaaagttcgtagagaattatagaccaacagctaactgttctttaacaaagcaatcttaccagattaggctctgattcattttttggtaatagctacttgcaaataagggctatgatggagcaactgctgatatttggtcttgtggtgtcatcctttttgaactgcttgctggctacttaccatttgatgatcgtaatcttgttgttttatacaagaaggtttgcatgtgcatatagaagaataaccttcatcaggtacaataaggtacctttcactgatgtttctacttctgtgaagatatctggagcagaatacacatgtccgccatggtttacaggacctcagaggaagctgatt

SEQ ID NO: 50334 - DNA, 405 bp, Gossypium hirsutum
  Clone ID: LIB3197-021-Q1-M1-D1
gttggtggtgtggagttggagctcatagcaatagctacgggtggaaggattgtaccaaggttccaggagttgaccccagaaaagttgggaagggctggtttggtcagagagaagtcttttggcaccacaaaagataaaatgttgtacattgaacactgtgcaaattccagggctgtaaccatatttattcgtggaggaaacaagatgatgatagaagagacaaagcgcagtatccatgatgcattgtgtgtggccaggaatctcattcgcaacaattctattgtctatggtggcggctcagctgagatttcttgctcaattgctgtggaggcagctgcagataaatatccaggagttgagcagtatgcagtccgggcatttgctgatgctttagactcagtcccc

SEQ ID NO: 50335 - DNA, 355 bp, Gossypium hirsutum
  Clone ID: LIB3197-021-Q1-M1-D10
ggtggattggtttcctagggattgaaaagaaattgaaagaaatacataggagaagagatgaatatcttcagaatttagtagatgggataagattaaatataagtaagaagaatttttcgctgattgaaaggcttctgtctcttcaacaagacgaccctgacttctgtcccgatcaagtcatcaagaccatggttttgatgatgttcattgcaggaactgaatctacggctattacaatggagtggacaatggcactcctgctgagtcatccagaggctttgcagaaggcaagagacgagatcattcgccatgttggacatgagcgcctgctaaatgaatcagatcttcccaaact

SEQ ID NO: 50336 - DNA, 399 bp, Gossypium hirsutum
  Clone ID: LIB3197-021-Q1-M1-D11
cccacgcgtccgctctttccttgtttttcatcgccgcttggcggacttctccacgttctttctttccctatttatactgtttccctcactttctttccttccaaacactcttctttccttaatctaacatggccttaactacccaaacttgtttccttcaaaatccattccttccttcgccttctctttcccagccttctgcatttcctgctccggcggctcttccttctcgaaaactccgccccatttctgtccagtgctccctggcttccgccccctctgtggcggtgacggcgtccaaggagtgcaaggtgaaatcggtcaaggctaggcagatcattgacagcaggggtaatcccacggtcgaggttgatttgatcaccgacggtctttatcgat

SEQ ID NO: 50337 - DNA, 407 bp, Gossypium hirsutum
  Clone ID: LIB3197-021-Q1-M1-D12
tactcattaggtcgctcatgcttaataacaataagggtggttccagttcaaaggatgtgaaagctgcagctgagggtcctagaaagaggaaataagcttttggggatcagtatacaacacatattatgcatatgggcacttaaagaagagcaaagggaagatcatagtcatagcatctacaacttgatcctaaaatgcgtgacgttgaaatcaattggaatcagcctctgagtgtgggaaggcaatagtagaaggggcctgccgttgatacgagtggaccaaactgtggaaggtgttttgccttggcatcatggatcggtggattggcttcctattaatgccttgtaattcccacaatgaagtacccaccaagaagttaacgcattttgttaatggactaacccaat

SEQ ID NO: 50338 - DNA, 312 bp, Gossypium hirsutum
  Clone ID: LIB3197-021-Q1-M1-D2
gaactctcctgctccagttcctcctgcggtaaaagatgattccaagtcacccaatgaatcctaatgcgatagcttaaggaaattcggcatctaaagccagtaattcaagcctcctctaattgctattttcatagactacccttatatttgtaactcatccttttgttgaatgttgaaaaccatcagcaacatgcatcttattctttaaacagaactttaaggccatgattaggctttttaatctatgcatatttgaatactgtaatagctatgtctgacatgaatattcacgggtcacggatttctgaagca

SEQ ID NO: 50339 - DNA, 432 bp, Gossypium hirsutum
  Clone ID: LIB3197-021-Q1-M1-D3
cggaccggtatttcctggctggacccacccatccggtgggtaaaacagaggagacccacttgaacgggggtgaaaaccagcatacaatggaggaggagtccttgaaaatatctttgccttgtcaggaacctcaaagttaggcgttcaaagaaagtcttgaagtatggcttatcgatcttaaacgaccacatagaacgatctgctcttggccctgaagaatggactctatatgagcagctagctattgctgctatggattgccaatgtctcgatgttgcaaaggattgcataaaggttttgcacaagaaatttccggagagcaaaagggttggcaggctggattgcatgttgcttgaagcaaaaggatcctgggctgaggcagaaaaagcttactcaagccttttagaggacaatccacttgatcaagtaata

SEQ ID NO: 50340 - DNA, 133 bp, Gossypium hirsutum
  Clone ID: LIB3197-021-Q1-M1-D4
cgggtcctaatcgtttccagcttcggcttctcaagcaaggcttcaggttcaagagaatgttaagcgttatgctcggaattaatgcttcactttttatcctcttcttcgcttgggtctctggatcagctgccac

SEQ ID NO: 50341 - DNA, 408 bp, Gossypium hirsutum
  Clone ID: LIB3197-021-Q1-M1-D5
cccacgcgtccggtgatagttcaaaaggagacagagtgggatttgcttcccagttgcatcttttggttaatgcattggggatgtcatttgaagctccatttatagaggattttgtgtcagttgaaaatcctggttcagacaatttggagtctactatggttataccaccacctaccgtccttgaccgtgtgcttaaagatctctttcttgaggatccccagttacctgattttgctaaagatgaacataagagttctcgagctattaaaggagcacctgttgagtctctttttgcgcagttttgtttacactcactatggtttggcaattgtaacatacgtgccattgctgtgctctggatagagtttgttcaagaaattcgctggcattgggaagagtcacagccat

SEQ ID NO: 50342 - DNA, 406 bp, Gossypium hirsutum
  Clone ID: LIB3197-021-Q1-M1-D6
cggacgcgtgggcgtaatggacaaccaacagaccgggggtgctggtgccgccaccaccggttcttccacaagcagcgacccagcaataaccagcccaatcaacagatgccttttccgaaatttggactctttggttctctcatttatggacgctgctctctctactcacgttcattccattcgtcaagctcaccaccaacaatttttccgtggaaactccgtcgtggactaaagggttcttggcggatattcggatcctattcgctatcaacttaggcttctcaagcaaggctcagggtccaagagaatgtcacgcgctatgctcggaattatgctacactctttatactgttcttctcttgatatctgtatcagctgaaacttgcacttgttgggaagatatcaa

SEQ ID NO: 50343 - DNA, 402 bp, Gossypium hirsutum
  Clone ID: LIB3197-021-Q1-M1-D7
aaaagaatgactttgagtaggttctggggttggtttcttatccacattgctctgtttttaagcttgtgttatgctgaggatccatttgttttctatgattttgaggtcacttacatcactgcttctcctttgggtgttccccaacaggttattgctataaataacaagttccctggccctactatcaattcaactaccaacaacaatgttgtcgtcaatgttcgaaacaaattggacgaaagtttacttatgcattggtctgggattcaacagaggcgtagttcatggcaagatggagttcttggcactaattgtccaattcctcctaagtggaattggacttaccagttccaagttaaggaccaaattgggagtttcttttatttcccatcactgcatttt

SEQ ID NO: 50344 - DNA, 399 bp, Gossypium hirsutum
  Clone ID: LIB3197-021-Q1-M1-D9
gtctcttcactcttgagtccagtattctaaggtgcatttttccatctactttccgtcactttcccgagaaaatgagagaaatcgttcacgttcaaggtggtcaatgcggcaaccaaattggagccaagttttgggaagttatctgcaccgaacatggaatcgactcaacgggtcgatacaacggcgactcggagcttcagctggagcgtatcaacgtttactataacgaaacaagttccggccgctttgttccacgcgccatcttaatggatctggaacccggtactatggacggcgtaagatccggtccgtttggacaaattttccgacccgataacttcgttttcgggcaatccggagctggaaataattgggctaagggtcattacaccgaaggag

SEQ ID NO: 50345 - DNA, 328 bp, Gossypium hirsutum
  Clone ID: LIB3197-021-Q1-M1-E1
caaaaaacatctttctgttcaattcaatcctcctttttctattcaaccataatgtcttgcttcattagcaaatacgccgatgagttggctaaaaacgctgcttacattggcacccctggaaagggtatccttgctgctgatgaatccaccggcaccatcggcaagcgtctttcaagcattaatgtagtaaatattgaagaaaacaggcgtgctctccgtgagctcctcttcactgctccaggagctcttcagtacctcagtgtgttattctcttcgaggaaaccctttatcaaaaaaccgcttcgggcaagcccttcgttgagttttg

SEQ ID NO: 50346 - DNA, 402 bp, Gossypium hirsutum
  Clone ID: LIB3197-021-Q1-M1-E10
cggacgcgtgggcaagtttttttttggttgggtagaatcaaatagataatgttcaggaaccaatacgataccgacgtcactacatggagcccggcgggccggttgttccaagtggagtacgcgatggaggccgtgaaacaaggctcggcggcgatcggactccgatctaagacccatgttgttttgggttgcgttaacaaggctaattccgagttgtcttctcaccagaagaagatcttcaaagtcgacgaccatatcggtgtcgccatagccggtctcaccgccgacggacgcgtcctatctcggtatatgcggaacgagtgtatcaactatagcttcacgtacgattcgccgcttcccgtgggccgactcgttgttcaactcgccgataaagcccatgtc

SEQ ID NO: 50347 - DNA, 405 bp, Gossypium hirsutum
  Clone ID: LIB3197-021-Q1-M1-E11
gttttggttgccatttgagtaagagctggctagctcaaacaattggctgacctaaacgatgatgttgcaaatattttcacttttcttctttttgttcagtatctgcaactccattttccttggtgctaatggagatgacaatggtggttggcaaactgcccatgccaccttctacggtggtgctgatgctaccggcacaatggggggagcttgtggttatggaaacctgtacagtcaagggtatggaacgagcacagcagctttgagcactgcacttttcaacaatggcttgagctgcggtgccctgctacgagctccggtgcaacaatgatcctcaatggtgcattagtcgaaccataaccgtgacagccaccaacttttgtccccctaactatgctttatcta

SEQ ID NO: 50348 - DNA, 406 bp, Gossypium hirsutum
  Clone ID: LIB3197-021-Q1-M1-E12
cccacgcgtccgttctactactttttggtttctcagctttttcctgtttattttcttttcttgttttgagttgcctgtttgggtagagagaaagtttttgagtaccgaagaagctgagaaagttacaatggcggtttcaaacaactgggctttcgcttctttagctcttctgtttttgcttcttgttgccgcaatggctactgtacggaccggcaacgtttccagcaatgtggaaacagagaaggtgcagagctcaaagaactccacaatggcagctaggtcaaaggaggtcgagccacttaacgagcatgccgttcctgacccaaaggctgtagcaacccaggtggaatccatcattgacatgaacattcgcaatgtgactgaaagaagaaagttggggttcttt

SEQ ID NO: 50349 - DNA, 400 bp, Gossypium hirsutum
  Clone ID: LIB3197-021-Q1-M1-E2
cccacgcgtccggttcctcaatctctctaatcctcactttcttccccatcaaacacaccttcgattttcccaaggttgtagaagatggcagaaggtgaggatattcagccacttgtttgtgacaatggaactggaatggttaaggctggatttgctggggatgatgctccccgagccgtattccctagcatcgttggtcggccacgtcacaccggtgtgatggttggcatgggccagaaagatgcatatgttggtgatgaagctcaatcaaagagaggtattttgactttgaaataccctattgagcatggtattgggagcaactgggatgatatggaaaagatttggcatcataccttttataatgagcttcgtgttgccccggaagagcacccagttc

SEQ ID NO: 50350 - DNA, 448 bp, Gossypium hirsutum
  Clone ID: LIB3197-021-Q1-M1-E3
cgcctggggcaccgccgggcaattatgggcgggacccacgcgtccgcgaagagagatgaaagacaatccagttcgccggggggagcttgctgcctacttcacccactgcaaccttcaactgcctcacctcagacttgctctgctgaatccaatgaccatctgctataaggctaagaaccttgctacagcaggtaactttgcccggcgactactagaaacaaaccccacaaatgagaatcaagcaaagacagcatggacaagtgctccaagctgcagagaggaagatgacagatgcctctcagctgaactatgacttcagaaacccattcgtgacttgtggggcaacttatgtgccaatttaccgaggacagatggatgtatcctgcccatattgcactgctcgcttcgtccctagccgggatgggcaattgtgtgctagatgtgatat

SEQ ID NO: 50351 - DNA, 403 bp, Gossypium hirsutum
  Clone ID: LIB3197-021-Q1-M1-E5
gaaaaaaacacccagagtctcagatcacccggtgctgtaaatcaagatgcaggcaaccaacggttctgatctgagctcaaagcaccaaaaacagcagcccccaccgccgccgcagccacagcagcctcaatggatgccgaaccaatggatgggagctatgcaatacccggcggctgctatggcaatgatgcaacaacaacagatgatgatgatgtatcctcctcatcattacatggcttataataaccctcattttcattatcaacaacaggtatcaacaacatcagttgcataaacaacaacaaggatctaattcagatgaggttaaaacgatctgggttggtgaccttcttcattggatggatgaaacttatcttcatagtttcttctctcaatctggcga

SEQ ID NO: 50352 - DNA, 398 bp, Gossypium hirsutum
  Clone ID: LIB3197-021-Q1-M1-E6
ggcgtcttgatacacgcccccatttattttatttttcaaacaaattttcccttcaattttcgtataatttcctaggaaaagaaatatgagagagtgcatttcagttcacatcggtcaggccggtattcaggtcggaaatgcttgctgggaactttactgtctcgagcatggcattcagcctgatggccaaatgccaagtgataagactgttggtggaggagacgatgctttcaacacctttttcagcgaaactggtgccgggaagcacgtccctcgcgccatctttgttgatctggagcctactgttatcgatgaagtgaggactggtacgtaccgccagttattccaccctgagcaactcatcagtggcaaagaagatgctgccaacaatttcgctc

SEQ ID NO: 50353 - DNA, 419 bp, Gossypium hirsutum
  Clone ID: LIB3197-021-Q1-M1-E7
atgtggctctgtgtcatcactcacctgggagaggagaatcagtagggagactagaaggtgggtagattgggaagctgcgctcaggtaactccagattgttggctctttccccaggacgtggatgctgcctacatgaacaaggttgaactgcaagccaaggcagacactctcacagacgagatcaacttcctgagagccttgtatgaagcagagctgtcccagatgcagacccacatctcagacacatccgtggtgctgtccatggacaacaaccgcaacctggacctggacagcatcatcgctgaggtcaaggcccaatatgaggagattgctcagaggagccgggctgaggccgagtcttggtaccagagcaagtacgaggagctgcagatcacagcgggcagacatggggacgacct

SEQ ID NO: 50354 - DNA, 398 bp, Gossypium hirsutum
  Clone ID: LIB3197-021-Q1-M1-E8
ttaggtcagccaattgtttgagctagctggctcttactcaaatggcaaccaaaacgatgatgttgcaaatatttccacttttcttctttttgttcagtgtctgcaactccattttccttggtgctaatggagatgacaatggtggttggcaaactgcccatgccaccttctacggtggtgctgatgctaccggcacaatggggggagcttgtggttattgaaacctgtacagtcaagggtatggaacgagcacagcagctttgagcactgcacttttcaacaatggcttgagctgcggtgcctgctacaagctccggtgcaacaatgatcctcaatggtgcattagtcgaaccataaccgtgacagccaccaacttttgtccacctaactatgcttta

SEQ ID NO: 50355 - DNA, 298 bp, Gossypium hirsutum
  Clone ID: LIB3197-021-Q1-M1-E9
ggggttaaaggaaacttcgaattcttggatagcatataactcgcattaatacatagaaaaacaggaaaacctcgtaaccacactaaaccattatagtttggtcataaacatttattcaccaggaaattgtctcaagatatcaaattcaattctccacatgtcctgcaagtaccagcagcaatttttcatagtctccatgagtgtccttgacaatggcacgagtcactgggacactgttccttcgctggtactcatctgctatgatctttaaatcaacctcagccctagtgcaaacaac

SEQ ID NO: 50356 - DNA, 310 bp, Gossypium hirsutum
  Clone ID: LIB3197-021-Q1-M1-F1
aaaaacagtttcatttccattctaagtttgtgtttttgatttgccttttgtgggtttttttttataaaaaagttcagcaaaaatgtttattgagaattttaaggtggagagccccaatgtgaagtacacagagaatgaaattcagtttgtttacaactatgaaactacagagcttgttcatgagaacaaaaatggaacctatcaatgggttgttaaacccaaaactgtcaaatatgaattcaagactgatatccatgtccctaaattgggggtgatgcttgtgggattgggggggaaccaatggttcaac

SEQ ID NO: 50357 - DNA, 206 bp, Gossypium hirsutum
  Clone ID: LIB3197-021-Q1-M1-F10
gctttgtcgccgccatgccgcaaggggattacatagagctacacaggaagaggcatggttaccgccatgacttcttcgagaagaagcgcaagaaggaagctcgtcaagtacacgagcgttcagctaaggctcaaaaggcgctgggtattaagggtaagatgattgcgaagaaaaattatgctgaaaaggccctcatgaaaaaaaca

SEQ ID NO: 50358 - DNA, 268 bp, Gossypium hirsutum
  Clone ID: LIB3197-021-Q1-M1-F11
aaaaaaatggttgggctgtttaggggggtgagtgggtgtccgggaccaagtggctttggttcagcctccaccgcccaagaggttaccgaagggattgatggaaccaacttgactgctctagttaccggtcatcgcctctctcttcttcatttctttgcaattttcacatcatctcctctctagcttccatgcttttacttttttgtttttttttcccttcttaattaccactttttctcacacacatatagactgtcattttgctaaa

SEQ ID NO: 50359 - DNA, 405 bp, Gossypium hirsutum
  Clone ID: LIB3197-021-Q1-M1-F12
aggggctgtattttccagctctacaggaatcagctgatccgccataaagatttcttgttcctttgctgtcatacatagggaaaacatgaccccctccttctttccaagaaaaaacctccttacctcatccatcttctccctcctatttataaattccccagcgcatctcaacattcatacaaacttttaaattcctttgaaaaacatagtatattgtcattaggagtcaatggcagggattggtaaaacggctccagatttcgaggacttattgccggcgatggcggagaagctggggggagacgggctgatgagggagttgtgtaatgggttcaagctgttgatggacgaggagaaaggggtgatcactgcggcgagcttgaagaggaacgctgctgtgctggg

SEQ ID NO: 50360 - DNA, 408 bp, Gossypium hirsutum
  Clone ID: LIB3197-021-Q1-M1-F2
tccatcgtataaaggagttgcaattcgtgaacataggcgtctttgtgctttcatccctcaaaacttttagatgagaagaaaggagaaagaaatacagaaacagcttaaatgccatttttaacgatcataacttaatggcctatgcataaagtgtttattagagcagcatgccattagtttctacctccccgaataagtgagtgcctgaagttgaataaaagagatgctggttttatagtgccgtaatttgtctagaaaacctttgtagtcagccgcaagcagcatatcatacacacacacacatatatatattttccttaccatgaatctgcagtaaatgggatgtggttacacttattttcagttcatgtatatgtgcaattgttggtggtggatttgcttttgttt

SEQ ID NO: 50361 - DNA, 408 bp, Gossypium hirsutum
  Clone ID: LIB3197-021-Q1-M1-F3
caagaacatgcaagtcactattgcctttaatgactggggtgaaggccttgtccaaagaatgccacgatgtagacatgggtatttccacgtggtgaacaatgactatactcattgggaaatgtatgccattggaggaagtgctaacccaacaataaacagccaagggaatagatttactgcacctaacaacagattcagcatagaggtgaccaaacatgaggatgcaccggagagtgaatggaagagctggaattggagatcggaaggtgacctaatggtaaacggtgcattctttatcgcgtcgggtgctggcacctcgtcgagctatgccaaggcttcaagcttgggtgctaggccatcttcactagtggcaacgataactaccaatgctggtgcgcataattgcaa

SEQ ID NO: 50362 - DNA, 354 bp, Gossypium hirsutum
  unsure (1)..(354): unsure at all n locations; Clone ID: LIB3197-021-Q1-M1-F4
tttggatatgttgctcccgagtatgctatgacggggcatctacttgttaagagtgatgtttacagttttggggttgtgcttcttgagcttttaaccggaaggaaacctgtggatatgtcccaacctcagggacaggaaaatctcgtaacttgggcacggccactactaagcagtcgggaaggtgtataacagttggtagatccttccttggctgggacatataactttgacgacatggctaaggtggcagccatatcgtacatgtgtgttcaccctgaggtgactcacagacctnttatgggtgaagttgttcaggctctgaagcttatatacaacgacactgacgaaactggc

SEQ ID NO: 50363 - DNA, 213 bp, Gossypium hirsutum
  Clone ID: LIB3197-021-Q1-M1-F5
cccacgcgtccgtgatcttgttaatgaagtcgtgaataaatatcgtttgatatttgtgagtagtgctggtaatagtgggccagcattgagcacagttggtgctccaggtggtacctcttcaagcatcataggagttggtgcatatgtctctcctgcaatggctgcaggtgctcattctgtagttgaacctccacccgaaaggcttgagtacac

SEQ ID NO: 50364 - DNA, 413 bp, Gossypium hirsutum
  Clone ID: LIB3197-021-Q1-M1-F6
cgtcatttgacgctaactcaaacagtattgaaaatccaaaatttgaaatttgaaagtacagggtttaggatttcaaatataaaattcataaaattcctttcacggttgatttgaaaagagctcctctgcctttcagttttgggaaaatcccagtagacctcaactcaactcaagtgctcatataaacgaaagaaatgagcactgtagttcatagaactccaaaatcggggagacagtcattgttttaccaagatttggcctcaccgatctctgcccggagagggaaattctctagtcctggtcaagcggctgctgtctcagctttatggcaggagaattttggaggttcagatcttccacctcctccaatgtacaccttggaggaccgttcagatttttctcctgaatctggt

SEQ ID NO: 50365 - DNA, 404 bp, Gossypium hirsutum
  Clone ID: LIB3197-021-Q1-M1-F7
aaataaagtcatggcaactgtgataattcaaagcattatgaagaacaaaactcgtatctctactgcagacagggttgaggcgttgtttgaactgataaaaggtcttattaaggatctggatgatgcttttcatgatgaggttgatgaagatgatttcaaggaggagcagaattctgtagcacgtcttattcagttgttgcatagtgatgaccctgaagagatgtttaagataatatgcacggtgaggaagcatatcttgggtggaggaccaaaacgcctacccttcactgtccctccccttgttttctcttcacttaagttggttcggcaattacaaggccaagaggaaaatccttttggagaagaggaatcaactacacccaagaaaatattccaggttttga

SEQ ID NO: 50366 - DNA, 398 bp, Gossypium hirsutum
  Clone ID: LIB3197-021-Q1-M1-F8
aaaaaaactaagctttctcctctcaactccgcgccgtttcgacgaatcgtcgtccaagatccaccacacttctctgcaactccgatgactacggagtgagcaaaggttcggccaccaggtacagtcgtacggaggtcagagacgtagcacgtacgaaggccagctgtacgggggcgtgcgtggtgtgggagaacggcgctggaggttgctgttgcagcgctctagggttttctgttaactgtcttgaggtgctgggccattgggccattgggtgtttaggctagttgggctaggggtttttggattttggatgtaaatggacattaagtggacattttatttattttatatattattattatttttttaaaaaaaaaaaaaaaaaaaaaaaataaaaa

SEQ ID NO: 50367 - DNA, 404 bp, Gossypium hirsutum
  Clone ID: LIB3197-021-Q1-M1-F9
caaaaatggttactttcaggtttcaccagtgccaagttgttggaagggctcacccaacagagagcgatgagcatcccaagatctataggatgatgctctgggccaccaatgaggttcgggccaaatccaagttctggtacttcttgaggaagctgaagaaggttaagaagagcaatggtcaagtccttgccatcaatgagatatttgagaagaaccctaccaagatcaagaattatggtatatggctccgctaccaaagccgtaccggttatcataacatgtacaaggaataccgtgacactactctaaacggagctgttgaacaaatgtacactgagatggcttctcgccacagagtccggttcccatgtatccagattatcaagactgcaactatcccagcc

SEQ ID NO: 50368 - DNA, 393 bp, Gossypium hirsutum
  Clone ID: LIB3197-021-Q1-M1-G1
gtttaagcttttccagtttagcttgaatcaaccaaaactcccaaatcttggaaattgggagaagatggcagcaccaacgctggagatggagccagttgagcgacagtcattgaagaagctcagccttaaatccctaaagcgcgctctcgatctctttagccctatccatggccaattatctgctactgaccccgaaagcaaaaaaattcgcatgagccacaagataaatgttgagtattgtgggattaaaaccgcctcgggtcagacttgtaggcaatctaattccggtgcagctgataccgggaatcaaggttctgtgccatcgaatgcccttgctcttgcaggtccagctgattctagggattcacagaagggaggagctcaaaatgcttt

SEQ ID NO: 50369 - DNA, 390 bp, Gossypium hirsutum
  Clone ID: LIB3197-021-Q1-M1-G10
attaaaatccctccttcccttaaacctgccttcttcttcctcttctgtttcgagctgtgattttctatttttatttttgcaaaatagtagagagagatggcgccgaatgatcccaaacaaagcggtggtttctttgcgtccatcgctagcagtatatctaattttggtagcgccatgactaaatcagtcaacggtttaatgggatatgaaaggcttgaagttgttaatccaaaaaggcgggactgaagatgccgaaaaagaagcaaggagaggaagatgggaacaggaggacagggaaaggtactggaaaatgatgccaaagtatatatggtctgatgttacctcaatggtgacactttccgtacttatttttgagccaatgtcaatgct

SEQ ID NO: 50370 - DNA, 395 bp, Gossypium hirsutum
  unsure (1)..(395): unsure at all n locations; Clone ID: LIB3197-021-Q1-M1-G11
cctaatcttccggcgcgcgtctccccaatcccctaccccgccactcggtcctttttcacttcgtccaacaatgttgaagaatctatccttccggttcgtgcaatcgtatcattgcttgatggttaccataatctcactggcttcccttggtggataactattgtaacttccaccatggctatgagatttgcattgtttcccgtagtagttattcatcttcaaaagctgaaaaagattggagagttagctcctaaattgccttctccattgccaccacctatgtcaggaagaagttataaagaccattttatacattttgagaaggaaagaaaggcaaatggatgcccctcatatttttgggtctttagcttcttcttactcangtcccatgcctt

SEQ ID NO: 50371 - DNA, 411 bp, Gossypium hirsutum
  Clone ID: LIB3197-021-Q1-M1-G12
cttttatatttttcctctccaattttccgtcactttcccgagaaaatgagagaaatccttcacatccaaggtggccaatgcggcaatcagataggagccaagttctgggaagtcgtatgtgccgaacatggcatcgattcaacgggtcgatatggtggtgactcggagctccagcttgagcgaatcaatgtttactacaacgaagccagttgtggccgttttgttccccgcgcagttttaatggatctggaacccggtaccatggatagcgtaagatccggtccttacggacaaattttcagacccgataacttcgttttcggacagtcgggcgccggaaacaattgggctaagggacattacactgatagagcggagcttatcgattccgttctcgacgtagttagaaag

SEQ ID NO: 50372 - DNA, 392 bp, Gossypium hirsutum
  Clone ID: LIB3197-021-Q1-M1-G2
gcagaagctgctcatggtactgttacacggcatttcagagttcaccaaaagggtggtgagaccagcacgaacagcatagcatctatctttgcttggacgcgtgggcttgcacacagggcaaaattggatgacaatcctaaactcttggatttcactgagaaactagaggcagcttgtattggaactgtggaatctggaaagatgaccaaagatcttgcactaatcattcacggctctaagcttgctagggacaagtacctgaatactgaggagttcattgatgctgttgcagcagatctaaaagcaagactttcttaaagcataaatttgaaaatggtcgaaaatggaaagggggtggttttcgggtttgcaggaaaaataataataaaaag

SEQ ID NO: 50373 - DNA, 394 bp, Gossypium hirsutum
  Clone ID: LIB3197-021-Q1-M1-G3
cctaaatctctataatcctcgctttcttccccatgaaacacaccttggattttcccaaggttgtaaaagatggcagaaggtgaggatattcagccacttgtttgtgacaatggaactggaatggttaaggctggatttgctggggatgatgctccccgagccgtattccctatcatcgtcggtcggccacgtcacaccggtgtgatggttggcatgggccagaaagatgcatatgttggtgatgaagctcaatcaaagagaggtattttgactttgaaataccctattgagcatggtattgtgagcaactgggatgatatggaaaagatttggcatcataccttttataacgagcttcgtgttgccccggaagagcacccatttctccttactg

SEQ ID NO: 50374 - DNA, 408 bp, Gossypium hirsutum
  Clone ID: LIB3197-021-Q1-M1-G5
aaatggatccttccatagctttcctttgatacatcctcctcctccttcttcaaacccacacttcgtttcttctttacacttcatattttccattatttttgacccttttgaatcctttctttgttttccccatttatttaaagctttagttatggcgctggatcttaacttgactgttatttccgatggtgatgacaattcaatggccggaggtttttccggttataataacaaccaaatggatagttccggcgggagctttggttcctccgtcgtcaacgccgacacagcgacaaccgccggcgacgatgactcctttttcaacgccgctgccaccgacactttcggttactccttcgacatcctcaaagccagccgagaagaagaacaggataaatacaacaaccg

SEQ ID NO: 50375 - DNA, 392 bp, Gossypium hirsutum
  Clone ID: LIB3197-021-Q1-M1-G6
gaaggatcaggatgcccatcatttgcgctggtcgtgttttccagttgacccgcgaattgggtcataaatccgatggtcagactatcgagtggctgttgcgtcaggctgagccttctattatagccgccactggtacagggacgactcctgctagtttttccaccgtgtcggtttccctccgcggagctaattctacttctttgtcgtcgaccacttcttcgtcgtctttggatcataagcctcttttgggtcctaccccgtttatacttgggaaacgcgtccggtccgacgacgataacgccggaaaggacgattccggagggctcactgttggaccaggagtgggttccattgtgggaccgaacgggacacatccgggtgggttctgggct

SEQ ID NO: 50376 - DNA, 404 bp, Gossypium hirsutum
  Clone ID: LIB3197-021-Q1-M1-G7
gttattttgccttttcgctatcgtctttgcctatcaactccacggcgcagatccgaggagtctctatttttcaatccaaacaacccctctaaacactctcttcttttattgctcctactcttccagtcatggcaggcttggcaccagaaggatcccaatttgatgctcgtcaatatgaccagaaaatgactgagctgctccagactgatggagatgactttttcacaagttatgatgaagtttatgacagttttgatgcaatgggacttcaagagaaccttctgaggggtatctatgcatatggttttgagaagccttctgccattcagcaaagaggaattgtaccattttgcaagggtcttgatgtgattcaacaggcacaatccggaactgggaaaacagcg

SEQ ID NO: 50377 - DNA, 405 bp, Gossypium hirsutum
  Clone ID: LIB3197-021-Q1-M1-G9
ggataacaacatgaagagcatacttaaatatgcaatgcttatggaaaaccataagccttacattgcaatgctctttgtacagtttatatatgcaggcatggccttgttttcaaaagcagcaatttccaaaggaatgaacccttatgtgtttgtggtgtatcggcaagcctttgccacgatcacgttagcaccattcgctttcttccttgaaagtaagcagacatctctatcatacaatttaatcatcaagatcttcttgatttcgttatgcgggctcaccttgagtttaaatttctactctgttgcaataaaatacaccactgcaacatttgctgctgccacaaccaacaccattcctgttcttaccttaatcattgctgtttgcttaaggatggaaagcatatc

SEQ ID NO: 50378 - DNA, 408 bp, Gossypium hirsutum
  Clone ID: LIB3197-021-Q1-M1-H1
ccatgtcttccaagatcaacggccacgtttcgcctcagccgtgtcctcacctcctcgtcttccgttcccgcaacggccccaagccctttcgcgccctacaggattgtatccgcgtcaagccgcccggcggtcgcgccgccataaggagggaacctactgaggtcccacgatgcggcacgtgcgaggaatcttcccgttcgagactctacgcgtgccgtcgcatgtgccgcagtgttctgccacgcgcctcttcttcactcccacgcgtctgatcactcgctttccatccccggtcatgagatcgccgttgacgtcgacagagctgagctattttgcttggcgtgcggtgaccaggtatacgatcgcgacttcgacgctgccgtcgtccttgcacagactgtcaacgct

SEQ ID NO: 50379 - DNA, 414 bp, Gossypium hirsutum
  Clone ID: LIB3197-021-Q1-M1-H10
cggacgcgtgggcgggattacccgctgagtttaagcatatcaataagcggaggaaaagaaacttaccaggattcccctagtaacggcgagcgaaccgggaaaagcccagcttgagaatcggtcgccatcggcgtccgaattgtagtctggagaagcgtcctcagcgacggaccgggcccaagtcccctggaaaggggcgccggagagggtgagagccccgtcgtgcccggaccctgtcgcaccaagaggcgctgtctacgagtcgggttgtttgggaatgcagccctaatcgggcggtaaattccgtccaaggctaaatacgggcgagagaccgatagcgaacaagtaccgcgagggaaagatgaaaaggactttgaaaagagagtcaaagagtgcttgaaattgtcgggaggg

SEQ ID NO: 50380 - DNA, 413 bp, Gossypium hirsutum
  Clone ID: LIB3197-021-Q1-M1-H11
atgtatcgttttgcttcaagccttgcttctaaagctagggctgctaggaacactacatatcagactggtagtaggttgagttggaataggaactatgctgcaaaagatattaaatttggggttgaagctcgagctttgatgcttaaaggtgttgaagagctttctgatgctgttagagtaaccatgggtcctaagggtcggaatgtggttattgaacaaagctacggtgctccaaaagtgactaaagatggtgtcactgttgcaaagagtattgaattcaaagacaaagtgaagaacgttggtgcgagtcttgtgaaacaagttgcaaatgccaccaatgatgtagctggtgatggaactacctgtgcaacggtgcttacacgagcaatttttaccgaaggatgcaagtctgt

SEQ ID NO: 50381 - DNA, 406 bp, Gossypium hirsutum
  Clone ID: LIB3197-021-Q1-M1-H12
cggacgcgtgggttagaaagtgctaagcaggctttgcaagaagctgttattttgcctgtcaagtttcctcagttttttactggaaagagaaggccatggagagcttttctgttgtatgggccacctgggactgggaagtcatacttggccaaggctgttgcaactgaagctgactctacattttttagtgtttcttcctcagaccttgtatcaaagtggatgggggaaagtgaaaagctggtctcgaaccttttcgagatggcgcgtgatagtgctccttccatcatattcattgatgaaatagattccttgtgcggccagcgtggagagggcaatgagagtgaagcttcaagacgtatcaaaactgaacttcttgtgcagatgcaaggtgttggacataatgatc

SEQ ID NO: 50382 - DNA, 359 bp, Gossypium hirsutum
  Clone ID: LIB3197-021-Q1-M1-H2
cggacgcgtgggctgtgaacaccaaggcagctctcaaacaagaaaactagtttttatttcaatccaagtttatgagtataggttttgcatggggttctattaaaaacctaaacaaatttcattcaatagctatttgatctcatcataaggaattcagcaagcaatgttatgatggagatagaatccaataaaccagcagggaatgggatggtgatcggtggtttaagtcctttaagtgaaaccttatggagagagaagactaacaccgagtttgtaggagatgtatcagcccgacttactttggaaagaatctaccgtaatggtaactctcaacaatggtgaaactcaaaaagtacttg

SEQ ID NO: 50383 - DNA, 354 bp, Gossypium hirsutum
  Clone ID: LIB3197-021-Q1-M1-H4
taccgggcattttagcaaaaatggcccggcttccgatagccgaagccaacgaggagagcccctttcgcaccttaactccggacgaattctatgcccgccactcagtgagtcactcatccgagttcatcactaacgctcgcggtctcaaactcttcacccagtcttggaccccactcgatactccgatcactggaatcgtcgccgttgtccacgggttcaccggcgagtcgagctggttcctccaacttacctctgttctttttgccaaatcgggattcgccacgtgtgcgatcgatcaccagggccacggattctccgaaggccttgacggactcgatactcatattccgaaca

SEQ ID NO: 50384 - DNA, 416 bp, Gossypium hirsutum
  Clone ID: LIB3197-021-Q1-M1-H5
gaattaccagtggacaaacaaaagcttactgctccaataaaatcaactgctgacaagtttcagcttctccctgagtttttaaaggttagagggttaatgaagcagcaattggattcttttgattgtttggttaatactgggattaagaagattgttcgtgtcaatgacaggattgtatctgatattgatccgagtatttacctcaggtactctgcaccgatattcgtcaacggagagtacattcaagttagatatgggcagaaaactagactagaaaaggtatacagcagatgcttctttgatgtgtgtacgatgcagaatgataggtgctttggatgtaatgcaacatctgttcctagcagaataatcttgttattgcaaaaatgcccatcatgttaaagagttaactctgtgtg

SEQ ID NO: 50385 - DNA, 395 bp, Gossypium hirsutum
  Clone ID: LIB3197-021-Q1-M1-H6
caaatcatctttttacaaccttcaatcctttgtggaattgatagaagggttaatcgtaaaacttcaattgatttgggcaaaccgaaggagttgtgaaaaggttgaaaggtatgatttagacttaagttaacacaattaaggagttgtgaaaaggttgaaaggtatgatttagacttaagttaacactatttgttaagggttctttcatagttaatatatatgtagaatctaatgtatgtaacttttggcaggttgtgggttcttgaaattttatattgagaaggtagaacacacctttttaagagggaagtttctttgtttgactcgagattattagtctggtgacaaaaagccaaaaaaatgtaccatttgctttgaagttatttatgaatatg

SEQ ID NO: 50386 - DNA, 405 bp, Gossypium hirsutum
  Clone ID: LIB3197-021-Q1-M1-H7
cggacgcgtgggtttttgtggagacacaagctcatttaattggcaacatgggtgtgaaatcggtgatccctggagcttggagcatttcacttcaactagagcagtcgacaaggctgcccctgaaagcagtatccatcacgctcaagtaaagattgaccaatgtcaatcagacaattttcattcagatggctttgttccttctgaagcaaactttaagcattataccacttgttcatctactagttatggggttgacctacaatcttatagcaccagtatggatgcaatgggtttaatattgtttctatgcaagcatgtggaagatcacaattttatgcgctgtgaaatttctgacgctcttcaattggccccggatcctgcaagacttgttttggatgcaatatc

SEQ ID NO: 50387 - DNA, 359 bp, Gossypium hirsutum
  Clone ID: LIB3197-021-Q1-M1-H9
aagagatggaaaattaagctaatttttttggttttttttagatagtgataggaaaaaaaagtagaattatgatttcgtagctacttttccttcttcttcttttctttcttcttcgcatttagattaacctaacctaaccctaggttttttttttggtgttcttgttaattttgtatttgtttggggtttaaggtaaaagacgcaattctagtttttttctcccttctttaatttaatttttttaaaagatttttttacttgattgatcatctggatgtttatgggttgtcggtgcggttgatttgaaatttattgtcgccgtataatttcctcgcttatttaacgggagggattttttt

SEQ ID NO: 50388 - DNA, 305 bp, Gossypium hirsutum
  Clone ID: LIB3197-022-Q1-M1-A1
ctttcccacaaatttcgatacaggaacttgtcgtgactttccggtcgccaaaacacttttttttttctctattttattttaggtcaagttatacttgttcccattgcacattgacttattagtattatataaacataaaaatattaatcgaaccctaagagatttttagatgatccaaaagaatccacccttttcttatctcttgttgattcatcaagcaaaatgttgactgatacagacaaggagttcttatctctaactgctactgttacagcggggtatcagttatttttctttttaatcgc

SEQ ID NO: 50389 - DNA, 298 bp, Gossypium hirsutum
  Clone ID: LIB3197-022-Q1-M1-A10
caccccaccaataacatgcaattgaaacctctcaacaccttcaccattacgctcatgttgttcttcactttcttgatcctcttcttttctggtttccttgaattcccttctgtttcctcctctatccaacaaccctttaccactccatccctcaccctttcttccaaccctaacccttttactgatctgctctctgctttcaagacatgggattctcaaatgggttgttcccagttcaagctaaaacgccacgatttgatccgtttgctttctaacagctctgggtctttgcaggaac

SEQ ID NO: 50390 - DNA, 377 bp, Gossypium hirsutum
  Clone ID: LIB3197-022-Q1-M1-A11
aagaagtgttattggccttgtccttggatacgtaacaagcttagtagtagatcttgcaatattaatagaggcaaaggaagaggcagaattgccagagtacatattgggcactgtccgactgaaccgagtgaagcctgaatctgctgtaccactgaacgcttgaagttaaccactgtggctaagccggtccttaaccatcttgtactggttggtatgaatatgagtaggctccaagtttaaaagttttatttgataatagtattaaatgatggatgagttaggttggatttgcacccagcttttcaattgtttcagtttacgatttgagaagactagcgttgggttcatagttgatcttcgaattgggggttgatctt

SEQ ID NO: 50391 - DNA, 258 bp, Gossypium hirsutum
  Clone ID: LIB3197-022-Q1-M1-A12
aggaaatggattgggaaatttaatatcaaaatgttggcccttgattttaaaccgttaatgaccaaggggtgtttttacttggcctatttttttttaaaaaaaaaatgcttacaaaaaccccccctttgtccctaccgaccccctttttacaagctttatttggaatatttttggtcataaaacctcaacttccaaagtggattaaacccttttttaatatgaatgggggacttgccccaacttataaaaaaacccttc

SEQ ID NO: 50392 - DNA, 306 bp, Gossypium hirsutum
  Clone ID: LIB3197-022-Q1-M1-A3
cagattcagaaagaaataaaggaagaagaagcaatggccactcttacagtgcccacgacagttccttcggtgtctgaagattgtgaacagctaagaaaagccttttcaggatggggaactaatgagggcttaatcatagatatattgggtcacagaaatgccgagcaacgaaacttgattcgaaaaacctacgctgaaacctatggagaggatctcctcaaggcactagacaaggagctctcgaatgactttgagaggctggttttgctttgggctcttgatcctgctgaacgtgatgcccttttg

SEQ ID NO: 50393 - DNA, 424 bp, Gossypium hirsutum
  Clone ID: LIB3197-022-Q1-M1-A6
cccacgcgtccgcggacgcgtgggctcatttcaagggagagagtgtatcagtgtttcttcccctcttttacttaatttctctccgccatggctctctccgtcgagaaaaccgccgccggccgtgagtacaaggtcaaagacatgtctcaggctgacttcggtcgtctcgagatcgagttagctgaggttgaaatgcctggtttaatggcttgtagaaccgagttcggccctgcccaacctttcaaaggagccaaaattactggttctcttcacatgaccatccaaaccgccgttcttattgaaacccttaccgccctcggagctgaagtccgttggtgctcttgcaacattttctctacccaagaccacgctgccgctgccatcgctcgtgactccgccgctgttttcgcttggaaaggggaga

SEQ ID NO: 50394 - DNA, 266 bp, Gossypium hirsutum
  Clone ID: LIB3197-022-Q1-M1-A7
cgctctgctttttctcgtgtgatcggaaaaaaaatcaacagtcatctaacggagttggaactcgatgggagaccgtggaggaggatgctgccctccgatggatctgttccgttcggaggcgatgcaattggtccagctcattatccccatggagtccgctcacctcaccgtgtcttacctcggcgacctcggtctcattcaattcaaagatctcaattcggataagagtccatttcagcgaacttatgctgctcagattaaaagat

SEQ ID NO: 50395 - DNA, 341 bp, Gossypium hirsutum
  Clone ID: LIB3197-022-Q1-M1-A8
caaccacaaacccatttaagttggtgttggtgacaccgagagttcaagatccaattaaagatgaaggtgatagagaagatccaatctttgcaagaagggaaagtggtgttttcctttgagttcttccctccaaagactgaggatggagtagacaacctattcgagagaatggatcgtatggttgctcataacccgtccttctgtgacattacatggggtgcaggtggttccactgctgatctcaccctcgacattgctaacaagatgcagaatatcatctgtgtggagacgatgatgcacctcacttgcaccaatatgcccgtagagaagattgaccatgc

SEQ ID NO: 50396 - DNA, 307 bp, Gossypium hirsutum
  unsure (1)..(307): unsure at all n locations; Clone ID: LIB3197-022-Q1-M1-A9
atcgccccttcaccaagaagttccgcagtgccggccatggccgtgacagtgacaagcggccgtccctggggctggcacccgggggcctggccgtggtcggccgcagtgccgggggggagccagggcctgaggctggccgggcagccgacagtggtgagcggcctctggcagccagcccgccaggcaccgtgaaggctgaggagcaccagcggcagaacatcaacaaattcgaacgccgacaagcccgccctccagatgcctncgcagcccggggaggcgaggacaccaatgacctacagcagaagct

SEQ ID NO: 50397 - DNA, 421 bp, Gossypium hirsutum
  Clone ID: LIB3197-022-Q1-M1-B10
cacttactgcacttcaaaatattaaaagcggaacaaaaaaaaaaaaaactacccattttttctgttcaccaagttctagataatcggagatatggcttggataacacgattcttaacggcggtagctttcttggctgtcggcataatattctcgccggagactttcggatcaaaatcggatggtacaaaatctccaaatctctcctcattcattaagctggctcatctcctgagcttctcaaccgcctggggcgctgccctttgggtcactttcatcggcggtatcatcatgttcaagaatctgcctaggcatcaatttggtaatctacaaagcaagatgttcccggcttatttctcgatggtgggggtttgttgtgccatatcggtggcggcatttggttatttgcatccatggaagtca

SEQ ID NO: 50398 - DNA, 425 bp, Gossypium hirsutum
  Clone ID: LIB3197-022-Q1-M1-B11
cttccggttcgcctgtcattcaacgagagaaaaacaaaaaacactcccgaaatggcacgcaagaagatcagagagtacgattccaagagattgttgaaagaacatttcaagaggctttccggtagagatttgccaatcaaatctgcacaaattacggaatcaactgatttcaatcagctagtagagaaggagccatggctttcgtcacagaaactggttgttaaacctgatatgttgttcggtaagcgtgggaagagtggtttggttggcttaaatctggattttgctcaagttattgctttcgtgaaagagcgccttggcaaagaggtggaaatgagtggatgcaagggacctgttacaactttcattgttgaacctttcatccctcacaatgaagagttctaccttaacgttgtctctgagcg

SEQ ID NO: 50399 - DNA, 418 bp, Gossypium hirsutum
  Clone ID: LIB3197-022-Q1-M1-B12
gtctacaacacacttgctagtattcctacttggagtggtgactctcaccactcccacatttggtacctatgagtcaccaaattatgggaaaccccctactcctgtattcaagcctcccaaggtgaaaccaccaccatatgaacctaagccaccagtgtatgaaccaccaaaaaaggagaagcctgaacctaagccaccggtttatgcacctccaaagaaagagaagcatggacccaaaccaccaatgtatgaacctccaaagaaggagaagcctgagccaaagccaccagtttatacacctccaaagaaagaggagcctaaacctaaaccaccagtatatgaacctccaaagaaggagaaacctgagccaaaaccacctaagccaccagtttatgcaccaccaaaggaagaaaagcca

SEQ ID NO: 50400 - DNA, 352 bp, Gossypium hirsutum
  Clone ID: LIB3197-022-Q1-M1-B2
agctatgttgatttctgttaatcgaggtcacccagagggcttgcaatttaagccagaaaagcgactggtagagaaagttgttcaggctggtgattctgctgctagtgaaagccgctcacagaaggcgcttgaagtggtagaggtctataagtcaagtgtgcatgttaatcccatttttgcttctgttggagctgacactgggaaactgtactcagcttctgaagctactgatattgtcttcaagtacattgagaaagaaaatctggtgaagcaaacaaacaaagccactgtggtattagatgcaactttgtgtgatgcgttatttaagggagccatcaagaaaggatcaaca

SEQ ID NO: 50401 - DNA, 409 bp, Gossypium hirsutum
  Clone ID: LIB3197-022-Q1-M1-B3
aaagaacgcagtcttttgatctctgccccaaagcaaaaagttgtcatcttttacaatcacaactactggttatttattttcatggctcaaggagattctaacttccagcaagacatggctaaagaggaagaagaacagaggctgaaatacttggagttcgtgcaagtagccgccgttcacgccgctttgtgcttcaccaacctttacctttacgctaaagaaagatcggggccgttgaaacctatcgtcgagaccgttgagggaacggttaaaagtgtggttggaccggtttatgataaataccatgatgtccctgttgaattccttaaattcgttgattccaaggtgggtgaatcagtgaccaagcttgatcgtcgagtccctccagtcatcaaacaggtctcaaccg

SEQ ID NO: 50402 - DNA, 423 bp, Gossypium hirsutum
  Clone ID: LIB3197-022-Q1-M1-B5
actttggtgtagttttcattcatggagagggggacagatcacactcccggagtggcacgcactaagatcatagagttcgatttcaagtgattgttgtaagtacatttcaagatgctttccggctgaaatttggctttccaaccttcacgaattaccctttcaacttgttcttatcaactagtagagaaggatccatggctttcgtcacacaaaccggttgtttaaccctgtatgttgttcggtgaccatgctgatgagtggataggttggcgttaatattagctagcttggagaggacgatccactcatacagaacgtgaccagactctctgcattattgaatgtcccctggtataccactggaggttctaaacatgatggattccgttgctttctacatcatgtcaaactaccccatgggag

SEQ ID NO: 50403 - DNA, 417 bp, Gossypium hirsutum
  unsure (1)..(417): unsure at all n locations; Clone ID: LIB3197-022-Q1-M1-B6
tgatttggttcagttcaacttgctagtataaaaaggtggtttatatgttcatgttcgcattggaccttatatttgtggagaatggaactttgggggttttcctgtttggttgaaatatgttcctggaattagtttcagaacagataatgagccttttaagaaagcaatggctaaattcacccagaaaatagttcatatgatgaaggatgaaaacttgtttgagtctcaaggtggccccatcatcctctctcagattgaaaatgaatatgaaccanaaagccagttatatggaccttcttgtaaagcttatgttaaatgggctgcaaaaattgcttttgggctaaacactggggttccatgggttatgtgcaaggaatatgatgccccagatcctgtgataaacacatgcaatggttt

SEQ ID NO: 50404 - DNA, 265 bp, Gossypium hirsutum
  Clone ID: LIB3197-022-Q1-M1-B7
gagacacccgtacaactccgtccacgtgcgatgcgtgagctcaacgctcaaatgatcttcgctatgttcgatgcgcacaccttcttcatatatatgtcccttgtccatattctaaacaaaggcactttgagcttcagattccatacacctatgataggcatgagttctatgtatgtaaatccgatggaaagacagcggatcacgtgacgcgtccaaagattgtcagcttctaccagagtgagtcaaataagacacggttggaatg

SEQ ID NO: 50405 - DNA, 423 bp, Gossypium hirsutum
  unsure (1)..(423): unsure at all n locations; Clone ID: LIB3197-022-Q1-M1-B8
caaataaccatgtctaccgctcaatcttgtccacttcccacagtttctctctctaaatacctggaagaagagggccagaataaaaatgcagaaagccagctcctcaaatcctcattaccagctgaaaatgattgccatactcaagctgaagattcagtttctgatgttcccaaatacctgctagaattgggtctcaccccagaatgcaagcagcttatatcctcactgccagccgagaaaggttgggttgccaatctcctccatcaatatcaggggttttggcacaccactcgccagttacaagcagtgcttactttgccaaaccactttcaagctcaggagacagatatcctncttttgtaccactcaaaatcaggaacaacatggntaaaggctatngtttttgccttgatgaaccgagtc

SEQ ID NO: 50406 - DNA, 366 bp, Gossypium hirsutum
  Clone ID: LIB3197-022-Q1-M1-C1
cttgaaatgttgcacagaagactcagatgattctacaagtaagattacttattcaggtgcgatactggaagtttgcatgaggaaactagtattctatccggaaattgttggtttcattgaagaagagaaggacaagtttccaacagttaaagttcaatatcttttcaattctcctcccaagttgatcatgttggatgacgagggccaatataaggaaaccataagaattgacaattggaaacgtgaacacatgctgcaattcctgcagaagaaagttcagccctattccgcaagctcatagacagtcgttcacattcctgttatcgcaagataaagtaaaaccgaactcagcaagattgaactatt

SEQ ID NO: 50407 - DNA, 338 bp, Gossypium hirsutum
  Clone ID: LIB3197-022-Q1-M1-C10
ggaaaataatgttctgtactttgtgtttgaatatatggaatgcaatctttaccagcttatgaaagacagagaaaagcatttttcaaaaattgaaatcagaaattggtgcttccaagtctttcaaggtcttgcattcatgcccagtgtggtattttcatcgtgacctaaacccgagaatttgtggttctagaacatatcaaattgctgattttgtctgcacgtgaatcagtcacattctcatacacgaatatgtctaacacgcttgtagtttgatacttctgagaagttattttggtttccttttttttctggtttttttctattactactatctaaac

SEQ ID NO: 50408 - DNA, 421 bp, Gossypium hirsutum
  Clone ID: LIB3197-022-Q1-M1-C12
ctctgctcgaaatcttcttcattctgattctctctccactgaactcttgctaaacggtatcgttttagtcagtctttcatcaatggcgaaagaaccagttcgcgtcctcgttactggagctgcaggacaaatcgggtatgctcttgtacccatgattgctaggggagtcatgttgggtgctgaccagcccgtgatccttcacatgcttgatatcccacctgctgcggaggctttgaatggtgtcaaaatggagttggtggatgctgcatttcctcttctaaagggtgttgttgctacaactgatgctgttgaggcatgcactggagtcaatgttgctgtcatggttggtggtttcccaaggaaggaaggaatggagaggaaagatgttatgtcaaagaatgtgtctatttacaagtctcag

SEQ ID NO: 50409 - DNA, 351 bp, Gossypium hirsutum
  Clone ID: LIB3197-022-Q1-M1-C2
ctttgaacttgaagatgggtgctgaaaagaatttcattgacatggaggagggaactctggagatcggaatggagtatagaaccgtgtccggtgttgctggaccattggttattcttgacaaagttaagggtccaaagtatcaggagattgtcaatattcgtttaggtgatggaacaactcgacgaggtcaggtcttggaagttgatggagagaaagcagttgtgcaggtttttgaaggaacatctggaattgacaacaaatacacaactgtgcaatttacaggagaggttttgaaaactcctgtgtctttagatatgctagggcgcatatttaatggctctggaaaaccca

SEQ ID NO: 50410 - DNA, 385 bp, Gossypium hirsutum
  Clone ID: LIB3197-022-Q1-M1-C3
attgttggatttctggccaagtccatttgggatgagatccaggattgctttggctgagaaagggataccatacgagtacagagaagaagatttgaggaacaagagtgatttgttgctgcagatgaaccctgttcacaagaaaatccctgttcttatccataatggtaaacccgtttgtgagtctgtcattcaggttcagtatattgatgaggtctggcatgataaagctcctttgatcccttctgatccttatcaaagagctgttgccagattctgggttgatttcgttgacaagaagatatatgacctggggagcaaaatatggaagacaaagggagaagaacaagcaaatgcaaagaaagaatttattgagtgcctgaagctg

SEQ ID NO: 50411 - DNA, 237 bp, Gossypium hirsutum
  Clone ID: LIB3197-022-Q1-M1-C4
cggacgcgtgggctagcgttgagctgaagcaaataacaaaaaatttcctgatttccaagcacaagacttagatatcacatcaagcctgatcgattcaaactccaactatctttcaccagaattctgctactgcatctgctccaactacacaaaagagtcgagaccagtgctaatttggtagatctaaccggtaagtctacctgtcttcttcgtatctttggctcaaaaagttagcta

SEQ ID NO: 50412 - DNA, 421 bp, Gossypium hirsutum
  Clone ID: LIB3197-022-Q1-M1-C5
ggcaagttgagcgagatgcgatacgtgttgctctgcaggcaacaatgaaggtccgatggaaaagaggttatggtggacatccaatattttaaaactaacaatccactgctgttaatcagcttctatgagcaacatcttaagtataaccctccatcttgatcacctaggcgtatttagtgtattgatgaagctgaaggccgccatactgattttgtttgtgtatgcattgttgtaactctattacattaatcgcagaagatagagcaggataagcaagagctctcattttcaagtgccaagctgactgatataacgatagctctctcttataactaccattagtgtgccttaattggacatttagcatggttatgattaccattagtgttgcttaattggacatttaacgttgttataacta

SEQ ID NO: 50413 - DNA, 424 bp, Gossypium hirsutum
  Clone ID: LIB3197-022-Q1-M1-C7
aaaagaaataaaaacagtttcatttccattctaagtttgggtttttgatttgccttttgtgggtttttttttataaaaaagttcagcaaaaatgtttattgagaattttaaaggggagagccccaatgtgaagtacacagagaatgaaattcagtctgtttacaactatgaaactacagagcttgttcatgagaacaaaaatggaacctatcaatgggttgttaaacccaaaactgtcaaatatgaattcaagactgatatccatgtccctaaattgggggtgatgcttgtgggatggggaggaaacaatggttcaaccctcaccggtggtgttatagctaacaaagagggtatctcttgggctactaaggacaaggtacaacaggctaattactttggttcattgactcaagcatcaacgatc

SEQ ID NO: 50414 - DNA, 417 bp, Gossypium hirsutum
  unsure (1)..(417): unsure at all n locations; Clone ID: LIB3197-022-Q1-M1-D1
taacaaccaaaagttttagatatagaattacggaagctcatctctctctttctctctctctctctctagatttcaccccttaggtttctctttcctcacagagacagagagagaatcagaggagcttaatcgagatttgatattcctcaccacagatggatcagatattgaacaaggtgggctcctattggctcggccagaaggccaacaaggagatcgattccgtcggcgacgacctcaactcattatccaccagtattgaagggggagccaaatggttggttaataaaatcaaaggaaaaatgcaaaagccgttgccagagctgttaagagagtataacctgccaataggaatcttccctcgtgatgccacaaattatgaattcaatgaagagactgggaagctcnactgtttta

SEQ ID NO: 50415 - DNA, 422 bp, Gossypium hirsutum
  Clone ID: LIB3197-022-Q1-M1-D10
ggagagcagtccctaggaacaattaaaaagaaccgaaaaaaaaaacacagattaagacagaagcatggccagccagctcgtaggaacaaagagagcttgtgtcgtgggtggcagcggattcgttgcctcattgctggtcaagttgttgctcgagaagggttacgccgttaacactacagtcagggaccctgacaaccagaagaagatctctcaccttgtaacactacaagagttgggagacttgaagatctttcaggcggatttaactgatgaagggagctttgatgcccctattgctggttgtgaccttgtcttccatgttgcgacacccgttaactttgcttctgaagatccagagaatgacatgatcaaaccagcgactcaaggagtggtgaacgttttgaaagcttgtgccaaagcaa

SEQ ID NO: 50416 - DNA, 422 bp, Gossypium hirsutum
  unsure (1)..(422): unsure at all n locations; Clone ID: LIB3197-022-Q1-M1-D11
ctcaaagaccaagaaaaagcgcgcgaaaggtggtaaaaccctagcgaggcaatgccggagcttccagaggtagaggcagcaagaagagcgatagaagagaactgcttggggaagaagatcaagagagcgattatagccaatgactctaaagtcatcgaaggagtctcctccttggacttcgagtccgctctcttaggcaagaccatcgtctctgctcaccggaagggcaagaacctctggctccaccttgattcccctccttttccctctttccagttcggcatggccggtgctatttatataaaaggcgttgctgttacaaaatataagaggtctgctgtaaaagacaatgatgaatggccttccaaatattcaaagttcctttgttgaactagatgatggttnggagctatctttcactg

SEQ ID NO: 50417 - DNA, 422 bp, Gossypium hirsutum
  Clone ID: LIB3197-022-Q1-M1-D12
cccacgcgtccgggatttttttcattcgtttcttctcacgctcgattaccttacaaaaagagaaaatgaccaagtgttacccaactgtgagcgaggaataccagaagtcagttgaaaaggccaagaggaagctcagaggtctcatcgctgagaagaactgtgctccactcatgctccgtttagcgtggcactcagctggaacttttgatgttaagaccaagaccggaggtccattcggaaccatgaagcatcctgctgagctcgcacatgctgctaacaacggcctagatatcgccgtcagacttctcgagccgatcaaggagcagttccctaacctcacctacgctgacttctatcagcttgctggtgtcgttgccgttgagattactggtggacctgaaattcccttccatcccggaaga

SEQ ID NO: 50418 - DNA, 242 bp, Gossypium hirsutum
  Clone ID: LIB3197-022-Q1-M1-D2
cggacgcgtgggttgctttcagcacaggcagttatgtggtcttaaaaccttcccacggacttgccattgtttcatatctcatatgccctgccttctttttcgttctgcatttgactatttgtgattactatattactaagatattatttcatcgttgattacaatatttttccaattcctaatgtcaatgttacctctttgaagaaatattactttaatattaataatctccatttaattgt

SEQ ID NO: 50419 - DNA, 421 bp, Gossypium hirsutum
  Clone ID: LIB3197-022-Q1-M1-D3
tcgcggacgcctgggatttattccctatattatcgcgggacctgttgctttttaatagcgcccggtatttatccattttattattggggaattgaaatcacttgcttcatccataaattttggggtttttgccccaagaaatattggttcgggtcggctttttaaatttattgatgtcggggtgggtggtcttgttggatgctttgggaaaaaaagaaaatcttgttctggtaaaattcaccagccactggctttcttttacaaggcaactacttattattcatattctttattacattgattcatagacaagctattcccttcatcgtattgcatgcaggttcacacgaatatattcttgctgtttctttaggtcttagcttttagggacatagctccccaggctcctatgcacatttta

SEQ ID NO: 50420 - DNA, 323 bp, Gossypium hirsutum
  unsure (1)..(323): unsure at all n locations; Clone ID: LIB3197-022-Q1-M1-D4
agctgtccctgaggaccgtccgaatcccggtcgccacgcgtcganaaatggtggtattgagcaaagggaatcatgtntttggtgtttgcatttgcagcaataagcagagggtatggacaagaatcaaccactcttgttcctgcaatcatcacctttggtgactctgtggtagatgtgggcaataatgactatctccctaccatcttcaaagctaactatcctccttatggacgggactttgccaacaaaaagcctactgggagggtttgcaatggaaaattagccactgacatcactggtgaaactctggggtttacaactta

SEQ ID NO: 50421 - DNA, 400 bp, Gossypium hirsutum
  unsure (1)..(400): unsure at all n locations; Clone ID: LIB3197-022-Q1-M1-D5
cccacgcgtccggccacgcgtccggctcaggctgtgagggaggcgaanagtgaaggtattcgtggtggaggccgtggtgggcgtggatgtgtaggtgggcgtggtggcagtggtggatacagacgtgattttgccaatgatgagaattcattcagcaacagtgctgaactcggtcaaggtgcacctgaagatggtgagagtagaaggccatctgaaaggcgtggtggctacggtggtcctcgaccttattgtggtggtggtcttcgtcgtggtttcagtaatggggaaattggacatggggtgagacctcgcaaggtgtatgaacgcattagtgggactggacgcggaaatgagctcgaacgtgaaggctttggtcaggggaattgggngaactcaaact

SEQ ID NO: 50422 - DNA, 318 bp, Gossypium hirsutum
  Clone ID: LIB3197-022-Q1-M1-D6
cttatttgaaccgcgcctaataaccgttcggatgggggtcagacgtgaaaaaaatggggctgtctttcaccaagctatgcacccggctatttgccaaaaaggagatgcgtatactgatagttgggcttgatgctgatggtaaaaccaccattctttacaagctgaagttgggagagatgggcactaccattcccaccatctggttcaacgtttagaccgctgaatacataaacatcagcttcactgtatgggatgttggtggccaggacatgatccgaccattgtggagacactatttccaaaacatgcaaggactta

SEQ ID NO: 50423 - DNA, 317 bp, Gossypium hirsutum
  Clone ID: LIB3197-022-Q1-M1-D7
atcggctaccatccggtcaagtgaatcagagcgcaaagccaggcggttcatcattcccttgcaagtcttgcggcaggtcatttggctctgaaatggccttgcaatctcattccaaggcaaaacatggaactgcagtgtaaaaatcaatcagtctaacaagtaatatctttgcttaactattaccattcctggaatgggcaaattgaacataattagttaaatgttttaggtgactataattgatgatttatgtgtttaatgagtagtatttgcaaattattaggttatcttaaatgaaattgtgttctgcctatagc

SEQ ID NO: 50424 - DNA, 421 bp, Gossypium hirsutum
  Clone ID: LIB3197-022-Q1-M1-D8
gcgccaggttacgcatatccaaacaggcaggtatgcggtcttaaaacctaccgacgctcttgccatagcattatatacgacatgagtcctattttcagtcaataccgggaattcaaatggttgcatgctcaaccccttacaatgccaagggattaatgaaagctgctatcagaagtgagaaccctgttatactttttgagcatgttttgctttacaacctcaaggagagaatcccagatgaggattatatctgtaatcttgaggaagctgagatggtaaggcctggagaacatgtcactattctaacctattcaaggatgaggtatcatgtgatgcaggcagcaaaaactttggtgaacaagggttatgatcctgaagtaattgatattaagtcattgaaaccatttgatctttacaccat

SEQ ID NO: 50425 - DNA, 424 bp, Gossypium hirsutum
  Clone ID: LIB3197-022-Q1-M1-D9
ccagttttgaattatattctctcaagcttaacatttcgtctttttgtgaacaatctttcttcttcttttgattttttcaccctaaaaaaaatttgaagccttctgttcaatgcaagctcgcttcgattctttaatggcgagttttctcttcattgggtcactgcttaatggcctttttttcttctctaaatctgttgtataagcattaatcggagtctggttttgtctctgaagaatatatggatttcgagaaaaagaagagatggaaactggtggtgccacgtattttgaaaatcaaatcagcatctcgttgttttttccaaaaggtgaaaccaactaatttcaatccgggctgtgcaccagtgtttctcaacgtctatgacttaacccctatgaatggctacttttattgggcaggcctcgg

SEQ ID NO: 50426 - DNA, 156 bp, Gossypium hirsutum
  Clone ID: LIB3197-022-Q1-M1-E1
acggtctagtctaacttccctatatttgcaggccaatcagctgtctgggacgctagatgttctacaagatctttccctaaaagatttgaacataaaaaataatcttttcaatggacccattcctgagaagatgcttagcattccaagctctaaaaa

SEQ ID NO: 50427 - DNA, 418 bp, Gossypium hirsutum
  Clone ID: LIB3197-022-Q1-M1-E12
cagtcatcgaacggcttgagaggaagttttccactatggctgctgaacatccttttaaggcagtcctgaccagtcttccaaagccaggtggtggcgagtttggaaagttctatagcttgcctgccctgaatgatccgaggattgataaactgccctactctatcagaatcctgcttgaatctgcggttcgtaactgtgacaacttccaagtcaagaaggaggatgttgagaaaattattgattggcaaaatacatcacccaagcaagtagaaatccccttcaagccagctcgtgtgctcttgcaggatttcactggagtgcctgctgtggtcgaccttgcttgtatgcgtgatgctatgcacaagcttggcagtgatacaaacaagattaatcctttggttccggtagatcttgtcat

SEQ ID NO: 50428 - DNA, 430 bp, Gossypium hirsutum
  Clone ID: LIB3197-022-Q1-M1-E2
ctgggacgcagtgagatgtacagatgttaatgagattgctgagacaattaaggatagagggatgaataacatgcttgctgagcgaattaaggatttcctcaatcggctggttagagatcatggaagcattgacctggagtggttgagagatgttccgccagacaaagcaaaagagtacctgctaagttttagaggactggggcttaaaagtgtggagtgtgtgcggcttctgacgcttcaccatcttgcttttccagttgacacaaatgttggacgtatagctgtaagattgggatgggtcccccttcagccactaccagagtcccttcaattgcatctcctagagctgtaccctgtcctggaatccatccaaaaatatctatggcctcgattatgcaagcttgatcaaagaacattgtatgagctacat

SEQ ID NO: 50429 - DNA, 422 bp, Gossypium hirsutum
  unsure (1)..(422): unsure at all n locations; Clone ID: LIB3197-022-Q1-M1-E3
cccacgcgtccgccattttccctctcttcaaagatccttgctttccttttcaatgggtttctttcttttcttcttcctttccttactgtctttagcttcttcagcttccagggatcatcacaaaaccttcatcgttagagtccaaaacgatgccaagccttccattttcaccactcacaagcactggtacgagtcttcccttgcctccgttctttccccttccactcccgcccaagttctccatgtttacgacaccgttttccacggtttctccgctaagctttcccccaccgacgccctcaatctccaaacgcttccccatatcctcgccgttatccccgaacaagtccgccgtctgcacaccacgcgctctcctcacttncttggcctncaaaccactgacagcgccggccttttgaaag

SEQ ID NO: 50430 - DNA, 148 bp, Gossypium hirsutum
  Clone ID: LIB3197-022-Q1-M1-E4
acgctgacgcgcagcgtgctggagattttttattcgttgggttttgccccctcaagagcttccaaacaatatcatgatcaagtgtttcccaactgatagcgtgatataccccagtcaacttcaaaggccaagagtcatcttaatggct

SEQ ID NO: 50431 - DNA, 416 bp, Gossypium hirsutum
  Clone ID: LIB3197-022-Q1-M1-E5
ctcgcattttattttttctttttttttttcccacactttttttaaaacccattagctaaaaatgcactgggttctttctgtgttgcttgcagttatcggagttactgcactgctcgttgtaactccggtaagtgggtaccgtccatggccgtacgtaaaacccaacagctccgacttaatgttcggaggctctaagaaatttgagggctcatcggagtttgtacatatgagatatcatatgggtccagtccttactgctcatatcaccatccacccaatctggtacggccggtggcagaaatcacagaagaaaatcatccgtgagttcatcaactcgatctccgccgttgattccaaacacccttcggtggctgggtggtggaagaccgtacagctttacaccgaccaaacgggag

SEQ ID NO: 50432 - DNA, 332 bp, Gossypium hirsutum
  Clone ID: LIB3197-022-Q1-M1-E6
acaggctttgaggtattggctggattcagaaaggggaatcaaattagaacagattatttttagtcaagaattagtaaaagagaacaatcaaagtaaaatcttaattttataatctatgtgagcataaagaaaaataatgtacaggtttttcgttccctcccccatttttaccctctcttatgggattcatgttgtaagaattgacgccttaattattcttgcctaaagaataagatacaagggaatagattatttactgaaaataataaccatccacccaatctggtacggacggtggcaaaaaatacggaaagaaaatcatccgtgagttc

SEQ ID NO: 50433 - DNA, 358 bp, Gossypium hirsutum
  Clone ID: LIB3197-022-Q1-M1-E7
cttgagactgagcctgagcttccacctcgtagcaattgcgtaacccttaatattgtttcttcattcaaataaacaaaaacatgaaaacactttgaaatttttcttcttctttcattcttttacatttcatttccattcaaatccgatttttaaacgctttccatttttaccccttttttatttcattcttattccgacacaaaaacccaagggcttgctctggtttttagcctcgcaattcttcgtatagtcgatctaagtcatagagggagcttaagtgggatttgatgtgcccggcaaggtggaaacaagcttattggaggtttcaagggaacatatcacttggagcgttcgtgat

SEQ ID NO: 50434 - DNA, 389 bp, Gossypium hirsutum
  Clone ID: LIB3197-022-Q1-M1-E8
gagaaacaaagaagagaaagaatggcttggatatggttggaagcagcacttcccctcggaatcatagctggaatgctctgcgttatgggcaatgctcagtatttcatccacaaagcttatcacggccggcccaagcacatcgggaacgatatgtgggacgtcgccatggaaagaagggataagaagctcttcgagaacctctcttcctccgattgatccctttttagttttcttctggaaacttggtcgatgttgtgagagaagaaataaaaagtgctctatgatattctgtaatgctgaagaagactaaagagcagatgaactcgagtattttctttttcatggtaatggtaagcatgaacttctgaaatgttgcacttttgacacac

SEQ ID NO: 50435 - DNA, 422 bp, Gossypium hirsutum
  Clone ID: LIB3197-022-Q1-M1-E9
cttcttccttcaatttccttctctctttctctctctctgggcaacttctcgttagggtttttgtgggttggtgttttccttcaacaaagagaacatcttttactgcttcgtctttttatttctcggtaccgatgatgatttgcctccttcacagccaactagagttccaataaggggtaatattgctggaaatggaagatctattgtaggttctgcttcatattttaggatgcattctgacatggaatcccaaatacatctacttgagcaagaagcttactgtgctgttctgcgtgcttttaaagctcaatccgatgccattacttgggaaaaggaaggcctgataacagaacttaggaaagaactgagggtgtcagatgatgagcatagagagcttctgactaaggttaatgctgatgata

SEQ ID NO: 50436 - DNA, 396 bp, Gossypium hirsutum
  Clone ID: LIB3197-022-Q1-M1-F1
aattgattgagctagctagctcttactcaaatggcaaccaaaacgatgatgctgcaaatattttcacttttcttgtttccgttcactatctgcaactccattttgcttggtgctaatggagacgacaatggtggttggcaaactgcccatgccaccttctacggtggtgctgatgctaccggcacaatggggggagcttgaggttatggaaacctgttcagtcaagggtatggaacgagcacagcaactttgagcactgcacttttgaacaatggcttgagctgcgatgcctgctacgagctacggtgcaacaatgatcctcaatggtgcattagtcgaaccataaccgtgacaggcaccaacttttgtgcccctaactatgctttatctagtgac

SEQ ID NO: 50437 - DNA, 418 bp, Gossypium hirsutum
  Clone ID: LIB3197-022-Q1-M1-F10
cttctgctttcgttttacttttttgtttcttccttatcttgcaagagtgcaagctgtactgcataactgattttttctgagctctggctttttattcctctccttcatgcagatttccatcttgattttgcctcgcatgcgagattaaacgttgtccaaactccaagcctttaccaattcaaaggcaagtcggtttcatggactccaatttacagacttcgcctaatagttctgatgcaaaaacagcatttcgtaagccttctaccgactcatctaaccgacaatataggcgtcgttctccagtcagcgggttatcttcatctgaaggaagttctccccagcgtgaccgtagcattagtcccatagtttcaagggatgatctggaaaaaagtgctgatactcgaccggggagagatgg

SEQ ID NO: 50438 - DNA, 370 bp, Gossypium hirsutum
  Clone ID: LIB3197-022-Q1-M1-F11
gtgccctccctcctgtctccaccagctgctgctgctcaatgattagcattctgctccctccccaatatccatccctctcctctctgtatttccattaatttgtttttctattttttttgcttttcttttcacatcaaacacctacaatacactgcagccaatcttttcagcttaaccccccccccaaaaaaaaagaaaaagaaaaaaactaagtgagaacattttcagtgagcctagttgaaattgtatacagttttggggttttgtttggtgccgcatgtcaaattcagaggctgctgctaaaaacggagcaacaatggatacccagagacaacaagcgccggggaacggtgcccttgccgtcaagaaa

SEQ ID NO: 50439 - DNA, 427 bp, Gossypium hirsutum
  Clone ID: LIB3197-022-Q1-M1-F2
ctctcctttatctctttcattgcttgcttcgccttcggccagtagccccaatttcttgcttcgcctttcgtgcttagttttgctgcaaaaatggaatacttttgactttaaatccgttcctaaatagtagaaggaaaataccagttcaaacactcgactaaactgcatcaaatttcggatcctccatttctttaaaagaattttctcagttactgttctattccattttgatcttatttatttcccaccaatttttctcacaaacttccgcgttgctgttgcaagcagtaccggaaattcccctctctttttatctttaatcggtttccacagttatttttcttcgattatttgaatgaagctgaggtagctgttttaggaacaaaggcgatttgaaacatttttgaaagaaaggattgatggatag

SEQ ID NO: 50440 - DNA, 308 bp, Gossypium hirsutum
  Clone ID: LIB3197-022-Q1-M1-F4
tgctgtgggcttcaagggcggcttcttacctgaggatctctgtcttccacagaggcttttccactgttctaaaggatctgaaatatgcggattctcatgagtgggtgaaggttgagggtgactctgccactattggtattactgatcatgctcaagatcatttaggtgatgttgtgtatgttgaattacccgaagtgggagctgctgtaaagcaaggtgaaagttttggagcagttgaaagtgtcaaggctacatgtgatgttaattctcctgtttcaggaaaagtggttgaagttaatgatgagctc

SEQ ID NO: 50441 - DNA, 426 bp, Gossypium hirsutum
  Clone ID: LIB3197-022-Q1-M1-F5
acgcggacgcgtgggtttttcacttctcaatccatttgcgcatttcccatagtttcggctgcgactctctcaattatcaacagattttaacttaatttacaatctacattgttcttcaatatcccgatctgcagccgccgttgataaatggagaaagtgattttagaggaaaaggatgcagttccccggtccataaaggagaaggagctgctaaccttattctcgcttacactggatcgtctgccgcatttattgggaaagtgctgcgaatacaaaagtcgcaacggaacggaaaaagtggcgtgaaagaaggcagagctttaacaacgcatgaacgggttctttggcgagaaaataaggagctaacggcgtcgtcaaacagagagattctagaacagctctacgtcaaacatgtcatgagcccat

SEQ ID NO: 50442 - DNA, 302 bp, Gossypium hirsutum
  Clone ID: LIB3197-022-Q1-M1-F6
cccgtttcaattcctctgctagggttttaagccccccattttgctcagtcatgcgaccaccgcgccaccaccgtgtttggtggctggtgatacaccgaaatgagtcgctcggccttgttccaagaggagctcgaaggcctggccttctttgagtcagaaggaaacgaggaaaatggatccccacccctttttagtcccgacgacagaggggagaccttcggcgacgcaacagcgaacgattcaggtggtgtcagatgcgcgtgaggcctgcgattggtggtgtacgcggtggccatttggtg

SEQ ID NO: 50443 - DNA, 410 bp, Gossypium hirsutum
  Clone ID: LIB3197-022-Q1-M1-F7
attaagctgactttcacatacatttccatcattcttttttcacactttttttatataattttgatagtataatatggagaaatggtatggggtttcagggctggtgttggttttgagtttgttctttggggttaaaggagaaccccaagtcccatgttacttcatttttggagattcattggtagataatgggaacaataatgaacttcgttcattggctagagctgattacttgccttatgggattgactttgctaatggaccgaccggccggttttcgaacggtcgaactacggtggatgtcatagctgaacttttggggtttgacgattacatccctccatactcaactgcaagtggtagacaaatactgggaggagttaactatgcatctgctgctgctggaatca

SEQ ID NO: 50444 - DNA, 408 bp, Gossypium hirsutum
  Clone ID: LIB3197-022-Q1-M1-F8
cccacgcgtccgcttgaacattgttcctcgggatagtcacatgtttgttttctgcgaccatgaccagaaaacgtataactgggaaacaaatattttatgtattctataagaaacatgtccatatactattttctgtgtcacattggaagtggattaaaactacaaaaaagagacttttaagatctctgtagctgaaccttgtaatcaaaggcttagtttgatcttggttattgttagtaaatatctttgcaaaaagaaggaattagtgcattggctgctctttattgctatagtacttgtatgcatatgatttgttattaggacctaaaaattatctaatacattatacaatttgatcatgtggttatggatgttgttgttttctcccctcattgttgtatttagtct

SEQ ID NO: 50445 - DNA, 371 bp, Gossypium hirsutum
  Clone ID: LIB3197-022-Q1-M1-F9
cggacgcgtggggacgattccccttaaatggccgcatcttttgactaagcaaaaaattcgccaccaccaatcgctggcgctgtccacaacactgaaaatgttgccgttcgacacaatcgaggaggctgctacattattgggacggaacctaacggtggccgagacgatgtggttcaagtactcggctaaaaagtcggattactatttttactgccacaacatcttgtttttgttcctcatattttctgtggttcctttgccgctcgtttttgttgagatgatgagatctttgggtttcgataaatacaagattcaacccaaagttagcctgtcgttgcctgagatgttcaaatgttacaaggatgttatgc

SEQ ID NO: 50446 - DNA, 411 bp, Gossypium hirsutum
  Clone ID: LIB3197-022-Q1-M1-G10
tgaaattcggatacgccatggctcgttcattcttcctgaaccgtagcatggaggcccactccctcctcaagaagcagggtttcgatgtttcctcctacggaaccggggctcacgtgaaactccctggtccttctatcagagaacccaacgtttacgagtttgggaccccttacaagcacatgttcgacgacctccgccgcaaagacccagagctgtataagcggaatgggatattgccgatgcttaaaagaaacttgagtgtcaaattggcgccccagcgttggcaagacaatgctgctgatggttgttttgacattgttttcacttttgaagagaagtttttgatatggttcttgaagatctgcacaaccgggatcaagttctcctgaaaagtgtgctggtgatcaactt

SEQ ID NO: 50447 - DNA, 322 bp, Gossypium hirsutum
  Clone ID: LIB3197-022-Q1-M1-G11
ggaaaggcataaagttgtccttcgtggtgggggagcttttctggtgttgcaaacctcaaacgcccataatattacacgtctacttgcaaagcacccctctttgtccacatttaattattacctgaccctcactcacttagctcccgagatcaaccgacgcaccaccatcactgtccttgcctttgacaacgccgccatgtcttccctcttggataaaaacccttccatttacaccatcaagaacatcctttcccttcatgtgctccttgactactttggtgccaagaagctttaccaaataaggaatggtactgcactagct

SEQ ID NO: 50448 - DNA, 415 bp, Gossypium hirsutum
  Clone ID: LIB3197-022-Q1-M1-G2
cccacgcgttcgcccacgcgttcgcactcccgtcctcacatttcccaacaaaaagcgaaggaaatcattttcatcaatcccccctatcacccttctttatctttcccacggaaacgaagagcaatcagaaaaccttgtgaagagaaaatgagggaaatcttgcatatccaaggaggtcaatgtgggaaccagatcggggctaagttctgggaagtcatatgcgatgagcatggaatcgacaacactggaaagtataacggtgactccgatctccagctggagcgtatcaatgtctactacaatgaagccagtggcggtaggtatgtccctcgcgctgttctcatggatcttgaacctggcactatggactccgtcagatccggtcttttcggccagatctttcgtcccgataact

SEQ ID NO: 50449 - DNA, 373 bp, Gossypium hirsutum
  Clone ID: LIB3197-022-Q1-M1-G3
gaaagctccaggtaaaaagccaactggtcttggtgcttctcctgctggccctccatcaactgttgatgcttatgagaagctgctttcatcaattcccgaatttgcaaactttggcaagcttttcaagtgctctgcacctgtggagctgacagaagcagaaacggaatatgcagttaatgttgtcaaacatatttttgatggtcatgttgtgtttcagtataactgcaccaataccattccagagcaattattggagaacgtcactgttattgtggatgcttcagaggctgaggagtttgctgaagtagcttcaaagcctttaagatcactcccatatgattcacctggacagacctttgttgcatttgagaag

SEQ ID NO: 50450 - DNA, 336 bp, Gossypium hirsutum
  Clone ID: LIB3197-022-Q1-M1-G4
aaagaaagaaagaagaagcatccctttataccccactttaagttactcaaaatttccgtacttttattttttgcatggcagtaagtctattgtcacatgagttgtctgacctgtgtcttgggaagccagcactaaggtcactttccatcacatccaccattgctgaagctcttgaggtcttgaaaacctctgatgacaactttcttaacatctggaattgggatgatgtctagtgtcaccttatatatgtaagcaaagctgggaagcacgtacctagtgccgtatctctggatcttgaacccactgttattgatgaagtgagaactggtgcttacc

SEQ ID NO: 50451 - DNA, 421 bp, Gossypium hirsutum
  Clone ID: LIB3197-022-Q1-M1-G5
cccacgcgtccgacataacctatatcttactttccaacctctttcttccatctccatctccatctccatctcctttctgcaattattcccaactttccatggcttccttcacacccaatctagaacctgcccctgacacctctcttcagttcaagcccaagaaacccaggataacccttcaaaccccttcctcttgtcctcccaatcaacgcatccaaagaattaagcgatggcggacccaacgagaccaacacatctactcctccaagctcttccaggctctccgtcgttctcgtcgtacctccgcctccagggaagtccacgaaacggctgacagggttctcgccgttttggccaagggcaccactcgttggggcagagccattctcaccgctcgcaaggtgaccaaacataagaaagc

SEQ ID NO: 50452 - DNA, 142 bp, Gossypium hirsutum
  Clone ID: LIB3197-022-Q1-M1-G6
acggcaaaggcatcacagacagttcctctgattcatctcagcttttcccttaaacaacaagcttaaccctcacaacaatggccttcatgctggaaacccaaaatatttgttcgaatgaaaggactgcctcatcccaagggaa

SEQ ID NO: 50453 - DNA, 427 bp, Gossypium hirsutum
  Clone ID: LIB3197-022-Q1-M1-G7
agagggcatggtgatgagtacaaaacaccagcagcactagctaaacccaataaagaatccagttctgaaccagctcttataaagagatattcatgcccttttgctggttgcaagaggaacaaggatcacaaaaagttccagcctctgaaaaccatcttatgtgtcaaaaaccattacaagagatcccactgtgacaagagctacatctgcagcaggtgccacaccaagaaattctcagtgattgctgatctcaaaactcatgagaagcattgtggtaaagataaatggctatgttcgtgcggcaccacgttttcgaggaaagataagctgtttggtcacatagctcttttccagggtcacactccagcaattcccctggatgaaactaaaggacccattgccccatctgaccctggagatggcagtg

SEQ ID NO: 50454 - DNA, 422 bp, Gossypium hirsutum
  Clone ID: LIB3197-022-Q1-M1-G8
gttccagatgcatatgcatcaaatatatctcaatatgttagtgttaaagatcgaagactatattcgctaaaatcacatgactatcacatcttaatgcaatatttactgccagttactctacgatgttgtatttcgaagaaggtgacatcttgtataattgaactatccaatataatgaaagccatttatggcaaagttttggatgttcaagaacttcagaaggtacaggatcgagccgatttgactttatgcaacatggagaaaattttcccaccttccttcttcacaattatggttcacttgataatccatctcccgaatgaagcaattcttggcagacctgttttctatcgatggatgtatcccatagaaatgtgttaattaaaatttttaaaattttccttcattcacctatagtacat

SEQ ID NO: 50455 - DNA, 265 bp, Gossypium hirsutum
  Clone ID: LIB3197-022-Q1-M1-G9
aaaaaaaaagaaagagaaaagtccccacgccgagccaaccgtatcatttcttctttgtagttttactttattggtagttcctcctcagcttcgccggcgcttgactctaccgttcgtctctgatcaactgcccacttaacggccaattacgtgtccatccctcttttttgctttctctagctccgccatgacaaaacctcaatttttagatctctaaattctaaattctaaatctgaatctagatttaaattcattttttttaaa

SEQ ID NO: 50456 - DNA, 327 bp, Gossypium hirsutum
  Clone ID: LIB3197-022-Q1-M1-H1
ctccactgctgcagggagcagagggaaaaaggatgggagcatcgttgtgttcttgcttcttcttcaactctggctctccgtctctgaacctccttctttcgttcttttcttattcagtattgtaaaagatggccgatgctgaggatattcaacccctcgtctgtgacaatggaactggaatggtgaaggctggttttgctggtgatgatgctcccagggctgtttttcccagtattgttggtcgaccccgtcacactggtgtcatggttgggatgggtcagaaggatgcctatgtatgagatgaagcacaatccaaaagaggttttc

SEQ ID NO: 50457 - DNA, 339 bp, Gossypium hirsutum
  Clone ID: LIB3197-022-Q1-M1-H10
gctttggatctatcattgcaatcaagggagaaaaagaaaaaaaaaacaagccatgtttttatttgattggttttatgggattcttgcatctttgggtttgtggcaaaaagaagccaagattttgtttttaggacttgacaatgctggcaagaccactcttcttcacatgttgaaagatgagagattagttcaacatcaaccaacccagcacccaacatctgaggaattgagtataggcaaaatcaagttcaaagcttttgatttgggtggtcaccatatcgctcgccgtgtctggaaggattactatgcttaggttgatgcagtggtatatttggtgga

SEQ ID NO: 50458 - DNA, 416 bp, Gossypium hirsutum
  Clone ID: LIB3197-022-Q1-M1-H11
cggacgcgtgggcaaacccccatctacaattatctattcttcttttgcttttttgttcgttttttttttctctcagatcataaattattttttgtttagagaagtaaaaggttgatccaatgagttccagtacgccatcatctagcgctggaggtgttggatccgctgattctgctgctcctagaagaaattccaagcgacccaaatactctaagttcactcagcaagagcttccagcttgcaagccaatcctcacgccacgatgggtcatatcagcctttatgcttgttagcattgtcttcattcctattggagtggtctctctgtttgcttctcgagatgtcgtcgaaatcattgatcggtatgaaactgcatgtgtaccggacggctacaaaaatgataaggtcacattcatc

SEQ ID NO: 50459 - DNA, 410 bp, Gossypium hirsutum
  Clone ID: LIB3197-022-Q1-M1-H2
caacacacttgctagtattcctacttggagtggtggctctcaccactcccacatttggtacctatgagtcaccaaattatgggaaaccccctactcctgtattcaagcctcccaaggtgaaaccaccaccatatgaacctaagccaccagtgtatgatccaccaaaataggagaagcctgaacctaagccaccggtttatgcaccttcaaagaaagagaagcatggacccaaaccaccaatgtatgaaccttcaaagaaggagaagcctgagccaaagccaccagatcattcacctccaaagaaagaggagcctaatccttaaccaccagtatatgaacctccaaagaaggagaaacctgagccaaaaccaccgaattatacaacctgcaagtatgagaaacctgaaccc

SEQ ID NO: 50460 - DNA, 338 bp, Gossypium hirsutum
  Clone ID: LIB3197-022-Q1-M1-H3
attttatcaccccacctggaggtatccctggggttcaaggcccaccacatatggtcgtgtacaaccattttgctccagtcggacagtttggactaagtttcatgggtacaacctacatcccatctggaaaacaacctgattggaagcacaaccctagttcctctgcagtcggtgaaggtgatgtgaaaaatttgaatatggctgcttcgcagggtaattctagcaacatacctgctcaaatgcatcatcttccccctggccctgggtcacctgttctgcccatagcatctccactcgctatgtttgatgtttctcctttccagtccaccccagatgtg

SEQ ID NO: 50461 - DNA, 187 bp, Gossypium hirsutum
  Clone ID: LIB3197-022-Q1-M1-H4
gagctacaaggtattaacctatgttgcttagattcttccattttttggagtatacatgtccaatccatattttgaagtataaatatctatacccaatgctcagatttgagttctgtaggtatcaggtcaggtgtactattttttgtattttgataggtgaaatttttttggcttttaacactcttga

SEQ ID NO: 50462 - DNA, 403 bp, Gossypium hirsutum
  Clone ID: LIB3197-022-Q1-M1-H5
cagttaatacacctacactaattgccggaagtcccgagcttggagcttgtcctgactacttcctccactaattgccggaagaagccggccgtaaaaaaaagatcttctacttcaacctggcttcggttgaccccctttcggtggtagtaagagcagagtcttgggttggtgcttgaagtaagggtcatcaaagagacggatcagtttccttttaattttaccgatgatttctatggcgatggaaaccctagatgacgagaaaccggaggaagaggaggtgatagataaagaaaatgaagagggaaatgaaaagttgaatcgttcaagtgccgtatctgcaaatacaccctccaaaatttgtcatacttttcctggaaatggaagatgtcaaaggttaagtttc

SEQ ID NO: 50463 - DNA, 416 bp, Gossypium hirsutum
  Clone ID: LIB3197-022-Q1-M1-H6
attgtaaatgacaaaatctccttcccgtatcagaactcaacacattgtgactggtgagaacacctttcagcccattaatctactcttaaattcgactttaactaagcaagaggagatccacggcgtgcttatagggtaaacatccacttttaccttttttatacatgcctctcgtgtggaaacaacaaatcaacaaaagatccagcccgaaaaaatagaacgccccgagatttcagtcggaaaatcacctttaagaatcggctgtttttttattgcttctggttttgcatgcgtatttctatgtttatgtggcgttcgagtgtgtaatatgcgtgtgtatattgcattccgaaagaagaagaattttcaatcgaaaataaaaggctttatagcccgataacacaaaaaaaaacaac

SEQ ID NO: 50464 - DNA, 412 bp, Gossypium hirsutum
  unsure (1)..(412): unsure at all n locations; Clone ID: LIB3197-022-Q1-M1-H7
gggacatcccatgggaaacatacatgacaactaagctgatttcaggaacaggcttgcagctgttaaggcgttatgataatagagctgaaagtgtcagggcacagttgttggatgatgatggtccagcctatgttcaagtgtttgttaacatcttacgggatatctttaaagaagaaacagtggaatatgttctggctttaattgatgaaatgcttacagccaatccgaaacgagccagactatttcatgacaagtctcttgctaatgaagatacttatgaacctttcctaaggttgctgtggaaaggcaactggttcatacaagaaaagagctgcaagatactggccttgatagtaagtgcaaggccaaaaacccaggatggcgttgntgcaaatggagaaaattcaaagaa

SEQ ID NO: 50465 - DNA, 418 bp, Gossypium hirsutum
  Clone ID: LIB3197-022-Q1-M1-H8
aagagattgttgatctctgcttggatcgtatccgaaaacttgctgataactgtactgggctccaaggcttcttggttttcaatgctgttggtggtggtactggttctgttcttggatctcttctcttggagcgtctctctgttgactatggaaagaagtcgaagcttggtttcactgtctatccttcacctcaggtttctacatcagttgtagagccttacaacagtgtgctgtccactcattcgctccttgagcacactgatgtcgctgttcttctggataacgaagcaatatatgacatctgcaggcgttctttggacattgaacgacccacttataccaatcttaaccgccttgtctctcaggttatctcatctcttaccgcatctttgaggtttgatggagccctgaatgtgga

SEQ ID NO: 50466 - DNA, 57 bp, Gossypium hirsutum
  Clone ID: LIB3197-023-Q1-M1-A10
ggactcactcaacatttccatttccaatctccagctcccaaggtaaatatgccgatc

SEQ ID NO: 50467 - DNA, 345 bp, Gossypium hirsutum
  Clone ID: LIB3197-023-Q1-M1-A11
cggacccgtggccttcatttcctttttgctcaaaggctcccatttttccacttttttttcttttttctaatccccaagggccgtccttttttcaaatttccaccccgagtctggtcttaagctcttaatgaactttctttttgaaatctacattttttggaataactgccaagatgactaaagttatgctgtgttgaaaaccctgtgatcttccaagtagcagggataatttgtttccactgcgcactcctgcaactgtgcgtggttgtgcaactgtcactatctgtaactgagtgaatatacacactgattatcgtataacaagagatagaggtcaagaaggac

SEQ ID NO: 50468 - DNA, 209 bp, Gossypium hirsutum
  Clone ID: LIB3197-023-Q1-M1-A2
aagctgaaagactaatttaaaaacgctcccacacaccacaagcaagccacacccaattacaccgaatcaactatgaagctatcgggcctcggcttcttctgttcttcttcgctcccttctctgcaggtccatctgaaacacatgtaagactgaccaaacatgctacaccccacaagaagtggactttatgatcctttgtgaccatatca

SEQ ID NO: 50469 - DNA, 443 bp, Gossypium hirsutum
  Clone ID: LIB3197-023-Q1-M1-A4
gtactcactcaacattcccatttccaatctccagctcccaaggtaaatatgccgatcagaaacatagcagttggccggcccgaagaggcgactcaccccgatgctctcaaggcagctttggctgagttcatctcaaccttgatcttcgttttcgctggatcgggctcaggaatggcttttaacaagttgaccgacaacggagcaacaaccccggccggtctcgtagccgccgctctagctcatggcttcggtcttttcgtcgctgtctccgttggcgccaacatctcaggtggccacgtcaaccccgccgtcaccttcggtgctttcgttggcgggaacatcactctcttgcgcggcattctttactggatcgcccaactcctaggctcaaccgtcgcttgcctgttgcttaagttcgctaccggcgacctggctgtaccagc

SEQ ID NO: 50470 - DNA, 432 bp, Gossypium hirsutum
  Clone ID: LIB3197-023-Q1-M1-A5
cggaagagctaccttttttttctccttttccaccgccgtcgatctcgatccttatcctcgttttcaaacaagctcaaaaaagatggccaacgctgcatcgggaatggctgtgcatgatgattgcaagttgaagttcttggagctcaagacaaaaagaacccaccgcttcattgttttcaaaatcgaggagaagcaaaagcaagttattgtggagaagcttggtgaaccaaccgaaagctacgaggattttactaaatgtctccccgctgatgaatgtcgatatgctgtgtacgattttgattttctaacggccgagaacgtcccgaagagcagaatctttttcatcgcatggtctcccgacacgtcaaggatcaggagcaagatgatttacgccagctccaaagacagattcaagcgagaactggacggaat

SEQ ID NO: 50471 - DNA, 413 bp, Gossypium hirsutum
  unsure (1)..(413): unsure at all n locations; Clone ID: LIB3197-023-Q1-M1-A8
caaaaacctgggttcagaccaatacaagttcttgcttcggacaatggttaatgctggcatcggtgaagaaacttacggcccaagaaacgtcattgatggcactgaagaaaccccgaatcttcctggttcgctttcggaggtcgacgatatcgtcttcggaaccctcgataaactctttgataacaacggagtttccccttcggaaatcgatatcctcgtgatcactatctcgatgattacttcggttccgtcgttgccggctcgggttattaaccgatacaagatgagggatgatgttaaagtgtttaatctctcgggaatggngtgcagtgctagtgttattgcggtcgacctcgtacatcatttgttcaaaacgtatacgaactcatttgcagtgattggtagctcggaat

SEQ ID NO: 50472 - DNA, 428 bp, Gossypium hirsutum
  Clone ID: LIB3197-023-Q1-M1-B1
ctaaagtcaaacacagtacgcggccttggatattaaatttcagagtatatttgtaaatgtagaatctattataatcggtgagtgtgggattcggttcctcctctgatttaaggcacaggattccaatgattaattaacttttttgaggggaacaaagaaataaagaaaatggagaggttagtagcagcggtgctggcagcaggttttctgcaggtattgctagcaaccgccgacgatcattatctgctttctcgtattgctttcggatcttgtgccaaccaaagtgctcctcagcccatctgggacgccatcaacaagtttgatccccaagtattcatatggctgggtgacaacatatatggagacattagacgtcctttcatctttctgggaaaggaaagggacgatggtccctggcagaaatgctc

SEQ ID NO: 50473 - DNA, 411 bp, Gossypium hirsutum
  Clone ID: LIB3197-023-Q1-M1-B2
cccacgcgtccgattcattcctaccactccaagctgcctaaccaactttctttttttcttaatatcaaattttcttttattatagtcttgccctttccttggccacccccctaatattccaaaaaatccacttttccacaacaaactatttcatacgatatggataccaacggagccaccacgagctccgccgctggtggtggttcaacttctaaatcttccagcaaaaagcattccagaaaacccgtatattctaggttcacgcagcaagagcttcctgcttgcaaacctattcttacacctggattggtcattgcaacatttaccatcataggaatcatcttcatcccattgggacttgtctcattgtctgcttcagaaaaggtggtagaaatcgtcgatcgttatgat

SEQ ID NO: 50474 - DNA, 381 bp, Gossypium hirsutum
  Clone ID: LIB3197-023-Q1-M1-B3
cggacgcgtgggttcagatttcagatgcggggcaaagaacaaccaggcagacgggttgcttagaagtcccaagttagagaacatgggtcgtggagtcagcagtggtgggggacagagttctttgggttaccttttcgggagcggagaagcttcacctccaaaaccaaccaacgtgacgagtactggcaccaccagtaatgaagttcctcagaagcagattgaggttgtgaaggaaactgtgcaaaaaccgaccactgcttcaccatcatcgggtgatgccaaggagatccctgcaggtgttccatggagcataacgaacaactatttccgagctgatggccagaattgtggcaactttgttacggagcgcaggacaactaa

SEQ ID NO: 50475 - DNA, 448 bp, Gossypium hirsutum
  Clone ID: LIB3197-023-Q1-M1-B4
caaaaaaagaagaaaagaaaaacaggaaagctttgattctaagccattttctttgctccattccatagaaagatctaaaagctcaagctttcctagcaaaattttctcgccatttttttaagctacgaagagagggaaaggaaaagggactaatttagagaaagaaaaggtaaagatggataaatttaagaatatgttgaaacccaagccgaatccacaacaactactaagagattggcaaagaaagcttcgtcaagagtgccgtaacattgaacgccaaatcagagatgttcagagagaggagaaaggtgtgcagaaggcaattcgagaagccgctaagagaaatgacatgggttctgctaaggcactcgcaaaagaaattgtaatgtcgagaaaagctgtgaaccgtctatatgagaataaagcgcagcttaattcaatatcaatg

SEQ ID NO: 50476 - DNA, 405 bp, Gossypium hirsutum
  unsure (1)..(405): unsure at all n locations; Clone ID: LIB3197-023-Q1-M1-B8
cggacgcgtggggtactggttctggtcttggatctcttcttttggagcgtttttttgttgactatggaaagaagtcgaagcttggtttcaccgtctatccttcacctcaggtttctacatcagttgtagagccttacaacagtgtgctgtccactcattcactccttgagcacactgatgtcgctgntcttctggataacgaagcaatatatgacatctgcaggcgttctttggacattgaacgacccacttatacgaatcttaaccgccttgtctctcaagttatctcatctcttaccgcatctttgaggtttgatggagccctgaatgtggatgtgactgagttccagactaacctggtcccatatcccaggattcactttatgctttcttcttatgcccctg

SEQ ID NO: 50477 - DNA, 442 bp, Gossypium hirsutum
  Clone ID: LIB3197-023-Q1-M1-B9
atttactctaatttcctagctttgttggggcagtgtgagagacgagatgagtatctgttttcgctgggtttcaaatttgtcttcttctactactggaactctctcaacttgcaaaacatacggttcacttccattgaagcctccgcttttctcctctatcctccaccttcctcctcgtcctagatttcaactcctaatccgagctacggctgccatggaaacagatcaaagtgcagtcacaagcacgaccgacaactcctcgaatccaccgatgaaactccttttcgtggagatgggtgttggttatgatcaacatgggcaagatatcacatctgcagcaatgagggcatgcagggatgctatttcttctaattcaattcctgcatttaggagaggatccatacctggggtctcgtttgagcaaatgaaattacagatcaaa

SEQ ID NO: 50478 - DNA, 423 bp, Gossypium hirsutum
  Clone ID: LIB3197-023-Q1-M1-C1
gcgatatgtaatgcagtggctgtggccaaaattctgaatgccacgcttattttgccagtgctgaaacaggatcagatatggaaagatcaaacgaaatttgaagacatttttgatgttgatcatttcattgactacttgaaggacgatgtgcgaattgtccgtgacatacccgggtggtttactgacaaatcagaattatttacaagtataagacgaacagtgaagaatattccaaaatatgcacctgctcaattttatatcgacaatgtgctgcctcgggtcaaagagaagaaaataatggccctaaaaccattcgtcgatagacttgggtacgataatgtccctccagaaatcaacaggctaagatgcagggtcaattatcatgctcttaaatttcttccggaaattgaggaaatggcaaat

SEQ ID NO: 50479 - DNA, 442 bp, Gossypium hirsutum
  Clone ID: LIB3197-023-Q1-M1-C3
aaataaggaagccagccactaagaaatgaagcttctctctcctttgttataggatttatgaataaccttaattccggcaataaaactccaccgtttctttctatcttcgtttgttgggttttggctcagatcgactcccggaacgaaggtttctcttttgtggacgtcggccattcatatcaacccaaggactttgcaactgttgttttctgacagataggtttggacatgtctttgattcaatttcgtcttaccctgtctttctctaccagcagtatggcgaatttgccctccttttcaactgaagaattttattggctagcatcattcttttgggggcatcatcacctgcaaactacatgggcgtctctctacctccttctattctcagatctttttgacaaggattccagtaatgacttgatagttaatagaagctcta

SEQ ID NO: 50480 - DNA, 437 bp, Gossypium hirsutum
  Clone ID: LIB3197-023-Q1-M1-C7
ctctccctctaaaccaaacccaaccaaagcccctgtctgcatgcaaaacttaaactaggaattaaacctattctttataaattgctacgaagggttgggttttgttcttaagatcatggatttggagttcctgcaatccatggatgttcagattcttgttggtttacgagtagctgttttagccattcttgatgctgctgcttatctcttttcctccaggaaacccataggttgccttgatccggaaaatttcagagagtttaagcttgtctagcgccagcagctgagtcataatgtggcgaagttcacatttgaacttgctactcctacttcagttctgggtctgtccatcggacagcatattagttgcaggggcaaggatagcctaggtgaggaggttattaaaccatatacgcctactacattggattctgatg

SEQ ID NO: 50481 - DNA, 170 bp, Gossypium hirsutum
  Clone ID: LIB3197-023-Q1-M1-C8
cacaggtgtacgtggacacccaggttgagatgtccactgaccctgtctagtatacaacgcatccaaacccaactgaacgggcttggtataatcaacggcgaaagaagaccttgttgagctagactctaccccaactttgggaactgacttgataggagaaggattagtgg

SEQ ID NO: 50482 - DNA, 313 bp, Gossypium hirsutum
  Clone ID: LIB3197-023-Q1-M1-C9
gcaaaacatagcaaaaaagaaaaatggcaaagtcagcagaggaagagaaccaacaaaaagcttttggttgggctgctactgataattctggaatcctctcccctttcaatttttccagaagggaaaatggtgatgatgatgtcactttaaaaattctttactgtggagtgtgccattcagacctacatactttgagaaatgactggggtttctccttttaccctgttggtcctgggcatgaaatttcaggtgttgtgaccaaagtggggaagaatgtgacaaaattcaatattggtgaccgggttggggttgg

SEQ ID NO: 50483 - DNA, 212 bp, Gossypium hirsutum
  Clone ID: LIB3197-023-Q1-M1-D1
acccacccgttcatcattatgagattctaaagtttcccgtggcgactcactatgctttggagaagaatgaagacaacaacactttggtttttattgatgacattcgtgctgttataaaaaagattaaagatgctgtgtaaaagatgtattattttcatgccaagaaagttaacacctttatcaggcctgatggaacaaaaaaagcatacgtt

SEQ ID NO: 50484 - DNA, 218 bp, Gossypium hirsutum
  Clone ID: LIB3197-023-Q1-M1-D2
tgaagattacacctgcaaaggctgagcacatcaagcagtacaagtgcccaagctgcagtagcaagagggctagagtttgaaagtagtaggttcagaaattgggctttaaatctatttaaaacgaaacagacaaggttggttttatagcctttttcgttacagtttagaagtaaaacagagcttggtccgtttagttgatgaatgaattttatgactgc

SEQ ID NO: 50485 - DNA, 437 bp, Gossypium hirsutum
  Clone ID: LIB3197-023-Q1-M1-D3
cccacgcgtccggttccttccttcgccgtctattgctttttgttacctcgatttcaagtgaatcagaatgggtaaggaaaagactcacattaacattgtggttatcggccacgtcgattctgggaaatcaaccaccactggccacctgatttacaagcttggtggtattgacaagcgtgtgattgaaaggttcgagaaagaagctgctgagatgaacaagaggtcattcaagtatgcttgggtgcttgacaagctcaaggctgagcgtgagcgtggtatcaccattgatattgccttgtggaaatttgagaccacgaaatactactgcactgtgattgatgcacctggacaccgtgactttatcaagaatatgattactggtacgtcacaggctgactgtgctgttttgattattgattccaccactggtggttttg

SEQ ID NO: 50486 - DNA, 449 bp, Gossypium hirsutum
  Clone ID: LIB3197-023-Q1-M1-D7
cttgatcattatcagattctcaagtttcccctcacgactgagtctgcaatgaagaagattgaagacaacaacactttggttttcattgttgacattcgtgctgataagaagaagattaaagatgctgtcaagaagatgtatgatattcaggccaagaaagttaacaccttgatcaggcctgatggaacaaagaaagcatacgttaggttgacacccgaatacgatgccttggacgttgcaaacaaaattggtattatctaagctagttagtagctaccttgttgagcatttattttccttttctttgcaaagagaaattatttcgagacattgagcaggcatttttatttttattagcacttaaaagtttgtaatattgcattgttgttgccaattagccatctctggttcaacttaagacagaaggtgatttttgatttacatgcttt

SEQ ID NO: 50487 - DNA, 439 bp, Gossypium hirsutum
  Clone ID: LIB3197-023-Q1-M1-D8
cggccccgtgggtaaaactggaccctgcttccacgggtcctggtaattattaattgtccgacttattccaccattttacaaaaaaaaaaggggagggggttgaccttttgattgaaaaaagggaccttacagtaagcaaggaaccacccccggtggaagcttgcaggaccttttcaggccaaaaatttaaaaacttgatgaagtccctgagggggaggaacaaaataggaccgactctggctcggattgctccagtgatggtggaagcaccgagagaagctgaaactaaaccacccaagaaatctcaaaacatactatcaggtgttgggtccaaagtcaagaactcaatttccaaggtgaagaaagcaattactggtaaatcttctcatccaaaagaaccaaaagcaatatcaccaaagtgaagcgagaaatgaagatc

SEQ ID NO: 50488 - DNA, 425 bp, Gossypium hirsutum
  Clone ID: LIB3197-023-Q1-M1-D9
cccacgcgtccggcaaatcctttccacagtcaagtgttgtctgttacttttattagagggggatccgcattcagtgtgatcccatcatatgtcgaatttgggggcactttgaggagtctcaccactgagggcttgcataaactacaacaaaggttgaaagaggtcattaaaggacaagcagccgtacaccgatgcaaagcttttattgacatgaaagaaaaagatcaccctctctatcctgttgttgtaaatgatgatggcttgcatcaacatgttcagaaggttggtagccttttgcttggtcctgagaatgtgaagaggggcaaaaagataatggcaggagaggacttcgccttctatcaagaaaaaatccctggattcatgctaagcattggaattagaaacgaggaactgggttcaattca

SEQ ID NO: 50489 - DNA, 428 bp, Gossypium hirsutum
  Clone ID: LIB3197-023-Q1-M1-E1
caaatctcttctcctcgtctatcgaatatgatgcaacaaccaccagcaggaggtgtagctccgccgccgtccatggcagccgatccgtctcaaacccagcagtaccagaaacaacagcagtcgcagccgtggatgatgatgtctcaacaacagcaggcgggtcagccagttcctccacctgcaggttggaatccgcaacccgtccctccgccctctcagatgcagcagtactccgctggttccgcgaccgtcggatccggcgaaattcggtctctctggatcggtgatcttcaaccgtggatggatgagaattacctcattagtatcttcgctcaaactggagaggtggtttcagctaaggtgattagaaataagcaaacggcactgccagagggatatgggtttatcgagtttgtatcacgtgctgc

SEQ ID NO: 50490 - DNA, 444 bp, Gossypium hirsutum
  Clone ID: LIB3197-023-Q1-M1-E2
cccacgcgtccggcggcgtcaagatgcagatcttcgtcaaaaccctaacggggaaaaccataacccttgaggtcgagtcttctgacaccatcgacaatgtcaaagccaagatccaagacaaggaaggcatccctcccgatcaacaacgccttatcttcgccgggaagcagcttgaagacggccgcaccttagccgactacaatatccagaaggaatccactcttcacctcgtcctccgcctccgaggtggtgccaagaagaggaagaagaagacctacaccaagcccaagaagatcaagcacaagaagaagaaggtcaagctcgccgtgctccagttttacaaggtggacgagtcgggtaaggttcagaggctgagaaaagagtgtcccaatgccgagtgtggtgctggaaccttcatggctaaccattttgataggcattatt

SEQ ID NO: 50491 - DNA, 435 bp, Gossypium hirsutum
  Clone ID: LIB3197-023-Q1-M1-E3
catttatcggtttctcctcttcctatatttcttttaatcttcttcctccttcatgctttgttaaaattctcttcttttatttttgatacaatcttttttttcccctattttaaagattctttagctctgtttaacatgtctttagccacttctcagatccttcagttttctccatattttctctaaatttggattcttcacgggttaatgaatccaaagtatttgttgttaaggagcacaagacgctccagatacctctttgcatccactttgaatgttctaataaaaggattttatcctagagatgttgtcagatacgctggcaactaagctttcacaaagttgaggtctgtgttgttgtgttgatgctttataagatggaccgagaagatacatcagggtttgtaagtggagggggagcgtcatcggaatttc

SEQ ID NO: 50492 - DNA, 399 bp, Gossypium hirsutum
  Clone ID: LIB3197-023-Q1-M1-E7
gttaggtcagccaattgtttgagctagctagctcttactcaaatggcaaccaaaacgatgatgttgcaaatatttccacttttcttctttttgttcagtgtctgcaactccattttccttggtgctaatggagatgacaatggtggttggcaaactgcccatgccaccttctacggtggtgctgatgctaccggcacaatggggggagcttgtggttatggaaacctgtacagtcaagggtatggaacgagcacagcagctttgagcactgcacttttcaacaatggcttgagctgcggtgcctgctacgagctccggtgcaacaatgatcctcaatggtgcattagtcgaaccataaccgtgacagccaccaacttttgtccacctaactatgcttta

SEQ ID NO: 50493 - DNA, 102 bp, Gossypium hirsutum
  Clone ID: LIB3197-023-Q1-M1-E8
aattttgaaagaaatattgggagaagaagcagagaagaagaactgaaagtagatctggtagtgataatatggatggtggttccggtgatgatcatgacccca

SEQ ID NO: 50494 - DNA, 432 bp, Gossypium hirsutum
  unsure (1)..(432): unsure at all n locations; Clone ID: LIB3197-023-Q1-M1-E9
gtttgagctagctagctcttactcaaatggcaaccaaaacgatgatgttgcaaatatttccacttttcttctttttgttcagtgtctgcaactccattttccttggtgctaatggagatgacaatggtggttggcaaactgcccatgccaccttctacggtggtgctgatgctaccggcacaatggggggagcttgtggttatggaaacctgtacagtcaagggtatggaacgagcacagcagctttgagcactgcacttttcaacaatggcttgagctgcggtgcctgctacgagctccggtgcaacaatgatcctcaatggtgcattagtcgaaccataaccgtgacagccaccaacttttgtccacctaactatgctttatctagtgacaatggcgggtggtgcaatcccncacgagaacactttgatt

SEQ ID NO: 50495 - DNA, 441 bp, Gossypium hirsutum
  Clone ID: LIB3197-023-Q1-M1-F1
atcatccccatgacatagcaaagatttgaaccatcaactaaaaaacatgcatgaatctcatggcacaacctcaaacataccttgatctagatacaagtatggccaaacctcctcctaatccacttccaaatgatcagaaagtagttcaggtttcgtgtggatggaggcatacacttgctattaccgaagagcaaaacatcttctcctggggtaggggtacaaatggacagcttggacatggagaatctatggaccggaattttccaaagatcatagaagccttgagtgttgaaggttccagtgggcaacagatagaatcttcaaagcttgacccattgtcaggtaaatcttgggtttctccagcggagcgatatgcagttgtccctggtgaaagtggacaaacagttaactcagaaaagggcaatggtggtgacgtggacg

SEQ ID NO: 50496 - DNA, 318 bp, Gossypium hirsutum
  Clone ID: LIB3197-023-Q1-M1-F2
cccacgcgtccggatgagaccattgccaagagagagagagagagagcaaaagaaaccacagaggaagtgaatcgaaggcttaaacttaagcttaaaagatgctgagatttactctattatggcttctctttttctttttatctctcgtttcatcttcagctcggcccgcaccttttgctatgcgcataagctgtggggctcgtcaaaatgtccgaacagcaccaacatatgcactttggtataaagattttgggtatacaggtggaattccagctaatgcaacaactccaagtttcattactcctccgctaaaaacac

SEQ ID NO: 50497 - DNA, 353 bp, Gossypium hirsutum
  Clone ID: LIB3197-023-Q1-M1-F3
attttctcttattctttttctttaatccaaacaaacaaaaagaaaaaaagggaaatgaagagattaagaagctattacatgcagtttcgacacaacaacaatcaagcaatggagcgtaaatggatcttcccattagctgttggctccattgtttctttatttttactcttcttaacaaccttaacctctttcgatggctccccttttcttttcttctaccgttcctccgccgtaaccggcggttcctctcctttcgtggaaaaccaactaaaacccatccctatttccaccctccctccgtctccccgcttcgcctacctcatctctggctctgccggcgacggtcggatgct

SEQ ID NO: 50498 - DNA, 440 bp, Gossypium hirsutum
  Clone ID: LIB3197-023-Q1-M1-F7
aaagctttgagggccaaattgaatctccccaaaccctaaccatgacctgatccgaaatccccaaaatctctcatcttcatcctccaccgtccgatcaaagctccatcatagaataaaagcaaaagaaatcaccagaaaaacctgaactgcttgacgatgccgtcccacggggatctggatcgtcagatcgagcacttaatgcagtgcaagccgctatcggaaacggaggtgaagactctgtgcgagcaagcgcgtgcgatccttgtggaggagtggaatgttcagccggtgaagtgtccggtcaccgtctgcggcgatatccacggccaatttcacgatctcgtcgaactgtttcgcatcggtggccacgctcccgacactaattatctctttatgggcgattacgtagatcgaggatattactctgtggagactgtcac

SEQ ID NO: 50499 - DNA, 434 bp, Gossypium hirsutum
  Clone ID: LIB3197-023-Q1-M1-G2
atttctcttttcttctcaaattatcattcaccatctttctcgtcggttttgagatctcaagctgatttattacgttttaatataggttgagatggcttcgaccactctaatctgcgatacccagccatggaaggacttgaaggctcatactgaggatatcaagaaaactcatcttcgtgatttgatgaacgacaaagaacgatgcgaatcgatgatggttgagtttgatggaatgtttttggactactcaaggcattgcgccactcttgagaccatggataagctctataaattagcagaggctgcttctctcaaacaacaaattaaccgaatgtatagtggcgagcatataaatagcacagaaaataggtcagtgcttcatgtagctcttcgagcaccaagggatgctgttataaacagtgatggaaagaatg

SEQ ID NO: 50500 - DNA, 171 bp, Gossypium hirsutum
  Clone ID: LIB3197-023-Q1-M1-G3
atttctcttttcttctcaaattatcaggcggcgatctttctgagggggggtggagatctcaaactgatttattacgcattaatataggttgtgatggtttcgaccactctaatctgaaatacccagccatggaaggactagaaggctaatactgaggatattaacaaaact

SEQ ID NO: 50501 - DNA, 411 bp, Gossypium hirsutum
  unsure (1)..(411): unsure at all n locations; Clone ID: LIB3197-023-Q1-M1-G7
gctaatntagcactttcatncttttaaaatattgtaaatttagctnttcatatactnttttggtttcttatctttttcttgcggaaaattatgggattttgcttgtagatggctcctactggtgtaagaacagaggagtggatcgaaagaaactcaaagggattggagattttctttaagcgatggatgcctgaacccggggttaaaattaagggtgtcgtatgcttttgccatggatatggtgatacttgcactttcttctttgaaggcattgctaggttcattgcagcatctggatatggtgtttatgctattgatcatccaggattcggtctttctgaaggattgcatggttacatctatagctttgatgaattggctgacaatgtcattgaacaatatgcaaaaatt

SEQ ID NO: 50502 - DNA, 447 bp, Gossypium hirsutum
  Clone ID: LIB3197-023-Q1-M1-G8
tttagattggggattggtccacccgaaatcacacggctttgaaaaaggcacttgatgccggaaaaggtttagggatgccaaatggagttcttattaatggcaaaggcccttaccgatataatgaaactcttgtacctgatggcatcgagtatgaaacgattaacgtgcattcagggaaaacttatcgccttcgagttcacaacgtgggaatatcgacctccttgaatttcaagattcagagccataatttacttcttgcggagagtgagggatcatatacggtgcagcagaactacactagcttagacatacatgtagggcagacatattcgtttctgctaaccacggatcagaatgcaagtagcgattactacattgtagcaagtgccaggtttgtgaatgaatcgcagtggaaacgagttaccggtgttgacattttgcgttatt

SEQ ID NO: 50503 - DNA, 370 bp, Gossypium hirsutum
  Clone ID: LIB3197-023-Q1-M1-G9
gtttggaacaaagatgtttatcaaccaagcatttatacaatttgagatgttcaccggtttgcctgcaccaaagcaactcattagggatgtattggcaagaactacataaaaagaaggaatatttgctaagtgaaagtctaattgcagctcaaccgaagtttgtcaagggattttcatgtgatcaagctcaaccccttattctttgacaatttttttttatttaataaatatatttggtcattaattttgagagaaaatgtaagcattttcttcttttgtctcagtttgtaattgtatcatgaaaattaacttccaaagatattacttatgcatttgtatttaatccatctattgaaccgattgaatgtct

SEQ ID NO: 50504 - DNA, 425 bp, Gossypium hirsutum
  Clone ID: LIB3197-023-Q1-M1-H1
aaaaaataaaaaaaaacctcagaaaaaagggctccaaccctcggagctccggcctcgtggccgtcctggctcgtcccagggtctggcgtgtgtggtctccacgcgcttaatgagccgccaccagagccaccgtatacggtggttagggtttcaaaaaccctcccttttctttgccaattctcaggtatcaaccttctccctctgtttttagtttctatttttttagatctgcgtgtgtgcatgttagtaaatgaccagaataaattaaaaaaaacgattcgattacccttgaaaaacgaaaatcgcttttatttcgcttgttcaaaggaataccatgggttgggctattctattcggtaaaccctataccctccttttttggttctctttgcttctaaaactctttgtttttgatccctactatt

SEQ ID NO: 50505 - DNA, 224 bp, Gossypium hirsutum
  Clone ID: LIB3197-023-Q1-M1-H10
tgctgatctaagatatagatatctcatgaacagcagtattgctgggcttgagaaggctgacgtattccttttggttggtacccagccaagggttgaagctgctatggtaaatgccagaattcgtaaaacagttcgagcatcaaatgctaaagttgcctatattggtccgccaaccgaattcaactatgattgccagcatcttggtactggcccacaaacactta

SEQ ID NO: 50506 - DNA, 308 bp, Gossypium hirsutum
  Clone ID: LIB3197-023-Q1-M1-H11
ggacaaattttcggactattactagccccgactaccgaggagctcatgggatactagtcgcctatgatgttaccgagatggagagcttcaacaatgtcaagcagtggttgaacgaaattgacagatatgctaatgacagtgtatgtaagcttctggttgggaacaaatgtgatttagttgaaaacaaggttgtcgacacgcagacagcgaaagcatttgccgatgaaattgggattcctttcctggagacaagtgctaaagattcaatcaatgtggagcaagctttcttaaccatggctggcgagaat

SEQ ID NO: 50507 - DNA, 276 bp, Gossypium hirsutum
  Clone ID: LIB3197-023-Q1-M1-H12
aaaaaagagtaaggaaaagcagtactttgatcgccagccctagaagttaacccatgcaccagctgcttgtataaaaagctttacattttgcaaaagaagggatttcagcacgaaattgaagttgtttttaaaaaccatggttgccacggctgtgacatcggcgtttttctcagtcacttcttcacctgactcctctgactcgaaaaacaagaagctcggaagcatcaagtcgaagccatcggtttcttctggaagtttgcaagtcaaggcaaatgc

SEQ ID NO: 50508 - DNA, 364 bp, Gossypium hirsutum
  Clone ID: LIB3197-023-Q1-M1-H2
atctctgcggctgccagcaggcagatcatgagccatcagctcctctggggccagctataggacaacagaactctcaccaaaggaccagacgcagcgggtaccatgggacagtgtcggtcagccaacgcagaggatgctcaggaattcagtgacgtggagagggccattaagaccctcatcaagaacttccaccagtactccgtggagggtgggaaggagacgctgaccccctctgagctacgggacctggtcacccagcagctgccccacctcatgccgagcaactgtggcctggaagagaaaattgccaacctgggcagctgcaatgactctaaactggagttcgggagtttctgggagctga

SEQ ID NO: 50509 - DNA, 440 bp, Gossypium hirsutum
  Clone ID: LIB3197-023-Q1-M1-H3
gactcttgacatgacttgtttgaactgtggagtttatccttcagatatcctaccttatcagttacagacttctgccactgggaccgaaaatctagcactctcagctgaaattaaagcagcagttgggaaccttagatctggatattcgaggattataaggatctgtaggtgtgtttcccaggtgattcaatcttcaggcaggtgatgagggtttctagcatcttaaagaagacaggagggacatcaacaatttgttggagtcctttcaatatttgcttgtgtgagcatgaagtttctctgtaaattgtattctgcatgttacaacttgccctgacatccttagtaagtcatgattacatttctttctcaaatttgtggaacaattttttgtggttgtgtaaatctttatcctggggcacgttaaagtagcctgtttacct

SEQ ID NO: 50510 - DNA, 396 bp, Gossypium hirsutum
  Clone ID: LIB3197-023-Q1-M1-H5
aaacaaagcgttcttcatatggttttcctgtttgtttccatggaaaacctgtaccattaccttgtaatcatcttattcattcttctcaccatcaagcttttgagtcataaaaccaaaaatttacctccgagtcccttttctctgccaattattggccaccttcacctgatcaaaaacccactttaccaatcactggccacgttattatccaaatatggccctgttttatatctcaaattcggatgcagacatgtccttgatctttcttctccttctgctgttgaagaatgcttgaccaagaatgatataatatttgcaaaccggcctcgtactatggccggggatcttatgacgtacaactacactactttcgtttgggctccttacggatcactt

SEQ ID NO: 50511 - DNA, 391 bp, Gossypium hirsutum
  Clone ID: LIB3197-023-Q1-M1-H6
ggacaatgtattgatccgtgagttccttgaggagaaaggtaatggcagagttctggttgtagatgggggtggtagtttaaggtgtgccatacttggaggcaaccctgtagttcaagctcaaaacaatgggtgggctggaatagtggttaatggctgcgtaagggatgttgatgagataaacggttgtgacattggggtgagagcgcttcattctcatccaatgaaagccaataagaagggaattggggagaaacatgtccctataaccattgccgggactagaatctgtgatggggagtggctttatgcagacactgatggtatcctcgtctccaaaactgagttatctgtttgagttcccttttctccctaaagattaaaatctgcaaga

SEQ ID NO: 50512 - DNA, 435 bp, Gossypium hirsutum
  Clone ID: LIB3197-023-Q1-M1-H7
ggattagctaatcagtcctcttctaccctccaaagccgtgcagcatcttcttctttttttcatttttcttcccatttccttccaaccttctccctccttttcatgcttctatcctgaccaaccctttaacaaaccctaacaaccctcaacaaggccttcaattacgaatcgtatgaggtgacagagtaacagagagtagcagcaatggttcccaagttcgtgctactcctggtcatacaatgggttgtgttacctatgtcacgggagatggacctgatcaacctcagccaaagatggctttcacaggagatgctctgttgataaggggatgtgggaggacagattttcagatttttacattaccgaaagagacattgctatatccagctcatgactacaaaggattctcagtaaccactgtgggagaggagatgc

SEQ ID NO: 50513 - DNA, 443 bp, Gossypium hirsutum
  Clone ID: LIB3197-023-Q1-M1-H8
tccgaacttggtttcaaccaaagtcagaaaactctaaagggggggggcccggaaaaaaaggaaggaaggaggagaaaccgggtgggaaataaaaaaaaaaagttgaggccgaaaaaatgcttaggaaaatggtgggaaggtatcggggaatagaaaaaatgggtaaatccctcccgattcctttttaaagtccgatcaaatcccatcgggtttcccaatctccagctcttccatagtaaaaaacatcgtttcttcttacaaaggcttcattcaattcccttcaagtggatttgactgagggaagatatttgctatcgggtgcatctgatgcatcggctgctgtttttgatattcaaagaacaactaactattaaggagatggtctgattgccaaacacaaatgtttgttttcggtggataagcaacaccaaaagggacataaa

SEQ ID NO: 50514 - DNA, 219 bp, Gossypium hirsutum
  Clone ID: LIB3197-023-Q1-M1-H9
ccttccggtggtgggcataatttcaatcctttcttcccttcccttggcctcccttccttggtttcccccctttttgtgcctttgggaataaaggtgccagcctcttttaaaaaaggggccgggggcccttttattgaggttgacctcaggggggtttacttggtttggcaggacctaccgggggggttgccaacttttggtaataaaccaaccaaaagg

SEQ ID NO: 50515 - DNA, 354 bp, Gossypium hirsutum
  Clone ID: LIB3197-024-Q1-M1-A1
accgaagcaggagaaaaaggaagaaaaacctctaagaaacctctttaacatttcccctccggtcatttaatcgccgccgccgctgctgtcgctgctgccaccacaatcaccgacacctttatttttataaggaaatagccttaacctgttattttccacattttaccctgacttatttctccaaatttacccaataaatgcagtttctagggttagggttttggggaactcgatgaaaaaaagaaagaaaagcgacatggaagatttcaaggattcggaatcgaaatcggagagtgagacaagcaacgggtcacaccaattgacgatcaagggttactcgttggctaaagggat

SEQ ID NO: 50516 - DNA, 318 bp, Gossypium hirsutum
  Clone ID: LIB3197-024-Q1-M1-A2
cacaatcttccaaatctctgggcctctccaaagcgaaccctctcttctctagaaaccaccgtcgagccatggctctaatcacccgaaccaccgccaatcgcctacctcacctcctctccctacagcgtgccctcgctatccacaccaccgacccttctatctcctcttctgccaccccaaccacatacgctcgcccttctccgccgtccacctccgggactccctccagtctgtctaagcctgctgagtacgcgatctccaaggtcgatgacctcttgaactgggcccgtcgtgggtccatatggcccatgactttcg

SEQ ID NO: 50517 - DNA, 361 bp, Gossypium hirsutum
  Clone ID: LIB3197-024-Q1-M1-A3
cccacgcgtccgcccacgcgtccggagatggagtaggttatggagctggaggtggaactggtggagctagaggagttggtggtgatggaactggaactggtagtggaattggaactggaactggaactggaactggtggtgaaactggagctggtggtggtggaactggagctggaactggtggtggtggtggtggaactggaactagagctggaactggtggaattggaactggaattggtggtggtggaattggaactggtggtagtggagctggagctggaactggaattggaattggtggtggttttggagctagttttggttttcgtcgtaatggaattagagctagtttcggagc

SEQ ID NO: 50518 - DNA, 319 bp, Gossypium hirsutum
  Clone ID: LIB3197-024-Q1-M1-A4
gaaagagactccaacagcaacagaggcttaagggtttgaccggattggaattcagacacagtgaacttcaacctttgctatttcctgtttctcgagaaacaaacagagaagagaaaggatggtgctctccgcatctctgcattcgctttgcataatcccccatacctctcaatctaaaatcccaagcatcttcaacctcctaaagtctcccttagccaaacctcacctcaaaatcaaccccattttcaaaccctcttccctttcccttttcactcaaccatccaagctcagaccaaaaacccaaaatttccgtaccccc

SEQ ID NO: 50519 - DNA, 379 bp, Gossypium hirsutum
  Clone ID: LIB3197-024-Q1-M1-A7
aagaagatgatgatgaattcgacagtgatgatagtaatgatgaaggaatggaaataatagcgaaaggatttggagtgaaaaggtatggttggcttgtttatatggataaaaaagcaaaagaggaggaaaaaagacagaaagaagtaatcaaaggcgatcctgcaattaggaaactgagtcgcaaggaaaggagaaaagcttctcaaatagagagggagagagaaagagaagctgcacggataaccggaacacgagtactccggaatctaggcgtagtccaacctatgatgcttatccacgtaggaggtcaagatctagatcgcgttcatattctccatcatactcaaggcgccatgcccgtggaggttattctgatgat

SEQ ID NO: 50520 - DNA, 366 bp, Gossypium hirsutum
  Clone ID: LIB3197-024-Q1-M1-A8
cattctttgctgttgaagtagtaatatctatagaagacggagatggagaggcaaagaaacaagcaggttcgtttgttgatgtgggttttggttgctgccttgttctcccacaacatggtcattgcagtgacctccactggccttggagagcagaaaaattactatccagttcctgaccctcatgctggaactcccccttcaggttcacatggcgcaccaccatcttcaggaggtggaacacctccctctcatggaaccccattacatggaggtggttaccaccctttaccaacaccatcaacgcctttgggtggaaattgtggaactccaccacatgaccctttaactccatcaacaccatcacac

SEQ ID NO: 50521 - DNA, 316 bp, Gossypium hirsutum
  Clone ID: LIB3197-024-Q1-M1-A9
tttgtgaattgggtgattgtatttattgcaggattttgtttaaagagagatccaaaaatggcagggaaaatatcggctgcatcagctcgggctcacactagaaaatctaagcaaaacacttccttcaagcttctctcagggatattcacaaagacactattggtcttgtttgtgggagctttggcatgggcttatcaggccattcagccgccgccacccaagacttgtggctctcctgatggtccactcatcacagcgtcgagaataaagctcagggatggacggcatttggcctacaaagagcatggcgttccac

SEQ ID NO: 50522 - DNA, 339 bp, Gossypium hirsutum
  Clone ID: LIB3197-024-Q1-M1-B1
tatggctcaaaatatggccaggagaagggttgttttggtgcagattttggcactagccttggccgctgttatgccattgctctcaggaggtgtggatattcaacaagttagggtgctggcagctaaattcaacgtgacttgcgtagtggtattcggagactccagcgtggatccaggcaataacaactatattgctacgccctttaagggtaatttcctaccgtatgggaaagacttcttcagaggccacccgactggacggttcagcaatggaaggctagccactgattttattgctgaagctttgggttacacgaacgaaattcgacctttccttaa

SEQ ID NO: 50523 - DNA, 360 bp, Gossypium hirsutum
  Clone ID: LIB3197-024-Q1-M1-B2
tcacttatcaaccagaactcgctctttccttcccttttttcccactgatcattacgtgtttgtgtttttgtctcaatgagtaatatgaaggaaaacagtgatgggttcgttagagcagatcaaattgatctcaaaagcttagatgaacagctcgagaagcatcttaacagggtttggagcagtgaaaacaagactaagaaagatgacggtggtggtgatggtgatggtgatggtgatggtgatggtgatgatcatggtggtgatcatgatgataataatgatgggaagctcaagcttgctgattatagcactaacatagctacaactttcaccaaaagggaaagactagaatgggagatc

SEQ ID NO: 50524 - DNA, 209 bp, Gossypium hirsutum
  Clone ID: LIB3197-024-Q1-M1-B3
tcacttatcaaccagaacttggtaaatccttccctttgggcccactgaccatctcgggtgcgaatcacagtttgcgtgacataatccgaaggaaaacactgatgggttccctggggcagatcggagggatcaccaaagcttcgattaccctcttgagaaggatcttaacagggtcaggggcactttatactttacttccaaaaatgagg

SEQ ID NO: 50525 - DNA, 320 bp, Gossypium hirsutum
  Clone ID: LIB3197-024-Q1-M1-B7
cggacgcgtgggttccaaaacagatttcaaacccccccccttttttttttactcctcaacccctctgccttctcagacgactgttgggtttcaccggcgcataatacgcctccaccaccaccgaggctctaataggatccgcaaggatccgatcgtcttcggaccggagaagcaaacgatcagcaacaccaaagcaaggtagaaatcctccccttttacgtatttatgcgatagattcaaaaattaaaaaaaaaacagcccatgaacaaaaaatgagacaccttttccaatgtttctttggctaatcgactctgtatata

SEQ ID NO: 50526 - DNA, 339 bp, Gossypium hirsutum
  Clone ID: LIB3197-024-Q1-M1-B8
cggacgcgtgggtttaaaaactaattacgtgccgactgctccgatctttggagcaaagcacagtttgcgacgcatggccgtcggtaagaacaagaggattttcatgggacagaatggcggaaagaataaggcagcgtatccttttgctacaaaggattgttacgatatcaaggctccttcagttttcactaccagaaatgtggcaaaaactctcgtcacccgtactcagggtaccaagattgcttctgaaggactcaaacaccgagtgaccgaagtttccctggctgatcttcaaggaggtgatgaggatcatgcttacagacagattcgtttgagagc

SEQ ID NO: 50527 - DNA, 344 bp, Gossypium hirsutum
  Clone ID: LIB3197-024-Q1-M1-B9
cccacgcgttcgaaaaaaagaaaaaaaaaaagagagttaataaaaaaaaaaaacaacaaaaaaaaaacgagaaaaaaaaaaaaaaaaacaggagaaaaggcgaattaaaaaaaggagaaggcaaaaagaaaagaaacagaatttaaatgaaaaaacaaaaaattttaaaagcaaaaagatccctgaggaaaagaaacacaaaaaaggtcaaagaacaaaaaaagtcgataaaaaaagaaaagaaaaaaatgaggaaaagcaagagcaaaaaatgtaaaaaaaaagatcaaaaaacagaaaaagaaaaggaaaaaattttttataaatgaaaaaaagatgatggg

SEQ ID NO: 50528 - DNA, 371 bp, Gossypium hirsutum
  Clone ID: LIB3197-024-Q1-M1-C1
tttgtttccatggaaaacctgtaccattaccttgtaatcatcttattcattcttctcaccatcaagcttttgattcataaaaccaaaaatttacctccgagtcccttttctctgccaattattggccaccttcacctcatcaaaaacccactttaccaatcactggccacgttattatccaaatatggccctgttttatatctcaaattcggttgcagacatgtccttgttctttcttctccttctgctgttgaagaatgcttgaccaagaatgatataatatttgcaaaccggcctcgtactatggccggggatcttatgacgtacaactacactactttcgtttgggctccttacggatcactttggcg

SEQ ID NO: 50529 - DNA, 148 bp, Gossypium hirsutum
  Clone ID: LIB3197-024-Q1-M1-C2
aggtggatggctatatatctgatgagaagaattgtatagtcaatgcttgaaatcctccactttatcggcagtcaacccagttttccaattcgagacctgtgtctgaaaataatatgaaccaatcattgcaggcacatagctggttaag

SEQ ID NO: 50530 - DNA, 56 bp, Gossypium hirsutum
  Clone ID: LIB3197-024-Q1-M1-C3
tttttttgatcttattgggtttatatgcatgcaattgcgtttttcttttggtattc

SEQ ID NO: 50531 - DNA, 419 bp, Gossypium hirsutum
  Clone ID: LIB3197-024-Q1-M1-C8
cccacgcgtccggcattagcaaccatagccatggcttcctcaccaaaactcttctctatgtctatcctcttcctttttgccctcttctccatgcaaatccatgctagagagtacttcagcaaattcccaagagttaacatcaatgagaaagagacaacaaccagagagcaaaagcacgagaccttcgttccccagaccacccaaaagccagaagaacaagagccaaggttcattcctgaaacccaaaatggttatggcctttacggccacgagtcatgctcaagccggcccactttcaccaccaaagaaacctatgaaccctatgtcacccctgttagattccaccctgatgagccctataacagcatcctcgaatcctccaacaataaagacacttactactacaacaagaatgccta

SEQ ID NO: 50532 - DNA, 336 bp, Gossypium hirsutum
  Clone ID: LIB3197-024-Q1-M1-C9
cgcaggagttcaatctgccatgggggcttacaagtacgtgtcagagctatggaggaagaagcaatccgatgtgatgaggttcttgcaaagggtgaggtgctgggagtaccgtcagcacccttccatcgtgcgagttaaccacccaactcgccccgacaaggctcgtcgattggggtacaaagccaagcagggttatgtcgtctatcgtgtccgtgtaaagcgtggtgggaggaagagaccacttcctaagggtattgtatatggaaagcccacaaaccatggtgttacccagctgaaattccaacgtaacaaacgatcagtttcataggaacgagc

SEQ ID NO: 50533 - DNA, 350 bp, Gossypium hirsutum
  Clone ID: LIB3197-024-Q1-M1-D1
catagccatggcttcctcaccaaaactcttctctatgtctatcctcttcctttttgccctcttctccatgcaaatccatgctagagagtacttcagcaaattcccaagagttaacatcaatgagaaagagacaacaaccagagagcaaaagcacgagaccttcgttccccagaccacccaaaagccagaagaacaagagccaaggttcattcctgaaacccaaaatggttatggcctttacggccacgagtcaggctcaagccggcccagtttcaccaccaaagaaacctatgaaccctatgtcacccctgttagattccaccctgatgagccctataacagcatccccg

SEQ ID NO: 50534 - DNA, 402 bp, Gossypium hirsutum
  Clone ID: LIB3197-024-Q1-M1-D2
tctgctttcgccaaacaaacgcaagatttgtagattcatttctcttgtctatctgcctccgtatcaatggctttgccaaaccagcaaactgtagattatccgagcttcaagctcgttatcgtcggcgatggaggaactggaaaaactaccttcgtgaagaggcatctaactggagagtttgaaaagaaatacgagccaaccattggtgtggaggttcatcccttggacttcttcactaactgtggcaaaatccgtttctactgctgggatactgctggacaggagaagttcggtggtctcagagatggttactacatccatgggcaatgcgccgtaattatgtttgatgtaacttgccggttgacatacaagaatgttccaacatggcatcgggatctttgc

SEQ ID NO: 50535 - DNA, 440 bp, Gossypium hirsutum
  unsure (1)..(440): unsure at all n locations; Clone ID: LIB3197-024-Q1-M1-D3
atagattagtaaatatttatcaataaaaataaacattttgtttttctaatatcttaacatatcctcccctttaggaggaagaacgtgcaaaacgtgaggagctagagcgaatactggaagagaataaccgaaaaattgcagaagcacaagccaaactggccgaagaacagttgagaattgttgaagaacaaagaaagattcatgaggaaaggatgaaactagaacaagaacggcaacgtcaacaaaaagaagaacaaaaaattatcctgggcaaggggaagtccaggccaaaactgtccttctcattaaaaacccaggattaaattgcaaactctgaactttttacaaagaaaaatggaaaaacttcgtatggtagcttcatgttgaagnggntttttgggtttgttttggtttcgttttttaatttgaaaatctggaaa

SEQ ID NO: 50536 - DNA, 300 bp, Gossypium hirsutum
  Clone ID: LIB3197-024-Q1-M1-D7
aaagagagaagccttaccaccgttgccgtagccaccatgggtcgtatgcacagtcgcggtaagggtatttcagcctcagctctgccttacaagaggaccccgccaagctggctcaagatctcttctcaagatgttgaggaaaacatttgcaagttcgcaaagaaaggcttgaccccatctcagattggtgtcattctccgtgattctcatggtattgctcaagttaggagcgttactggcagcaagatcttgcatatcctcaaggctcacggtctggcccctgaaattcctgaggatttg

SEQ ID NO: 50537 - DNA, 373 bp, Gossypium hirsutum
  Clone ID: LIB3197-024-Q1-M1-D8
ggaaattccctttcgttttcccccaaaaagtttccaatttctcctccttcaggatcgacgctagactatccatcgccaccgttcatcatcgtctcagccgcctctcttaaaaccagggataagaaaagatgggagctttcatatcgaagttctggttcatgttatttcccgcaaaggaatataagattgtggtggttgggttagataatgctggcaaaacgacgacgctttacaagcttcaccttggtgaggttgttactacccatcctactgttggcagcaacgtttaagagcttgtttataaaaacatccgtttcgaggtatgggaccttggtgggcaagaccgactacggacatcgtgggcaacatacta

SEQ ID NO: 50538 - DNA, 329 bp, Gossypium hirsutum
  Clone ID: LIB3197-024-Q1-M1-D9
tgctatccttctgatcatctctctcttcctgacagcaaaacaatggctgatattccgatcagattcggaatcattgggtgtgccgagatagcccgcaaagtttctcgagctatccagcttgctcctaacgccacagtctccgccgttgccagccgctcctttgacaaagccgccaatttcgccaaggccaatggcttcccacctgacaccaagatctatggctcctacgagtcccttcttgacgaccccgacatcgacgccgcttatttgcctttacccactagcctccacctcaaatgggctagtttgacggctcagaaaaagaagca

SEQ ID NO: 50539 - DNA, 416 bp, Gossypium hirsutum
  Clone ID: LIB3197-024-Q1-M1-E1
caaagcctttggacaagaaaatggcttctacattcaaaaccaaattcatggaactggacccattagagcaatggcaagcaggtttcttgaagagaagagatggcatccttttgaaaggattagtaacagatggaaggttaatggaaatatgtacaaggacatgcagtctcaatcacattgtttttggcaaagaccaagctcagatgaagacaagcatgaacccttgaccaaattcagtagctgtagaacagagtttgagtggaaccaagataaagtgctcaaggacggggaacggttgcctgatttgcagttaagactaagccaaagaaatggaaaatttgatgaagagaagaataaccattgtaaaggaacacatgaaattagcacacagctttcactttcttaatcatgttgct

SEQ ID NO: 50540 - DNA, 331 bp, Gossypium hirsutum
  Clone ID: LIB3197-024-Q1-M1-E10
gaaaagtgcatgtttaaatttttttatcaggctttattttagggaatggagattgataaataattctctactagccctaacaaagctttctgttaatttttcttttcccttttccaattgattgcggataaaggcagatgtttcaaaagggaatggcagcaaaatcttttacgtcatcacgctttgatgaatccttgaagaatcatctagctatggttgatgacttaaatgtgaagaagccattgagtgtggtgtctgctttcctctttggtcaagcattgcggttgatttctgcccaactagcaaacgcaagtgaaattactagcggaga

SEQ ID NO: 50541 - DNA, 350 bp, Gossypium hirsutum
  Clone ID: LIB3197-024-Q1-M1-E11
gttgatgcagagatgctgaggaaagattggctagagaaggcagtcatcaagcaccccggggagtggtaattgaagaaataactgaagaaactttaaccacctctcctgctactcttcaaaggtcatctactgaacattcatcgaaacagccacgagaaagtactggaatcgctaagagtgagaatgagaaaaaagttgcggacttgagaaccaattctgagtgtttacaggctttaaaggaggatccagaggcactcaggtttgttccattatcacaaaatcacctgttaggtgatattcatttgcttagtctggtaatatcatattctatcttccatgagtggattatg

SEQ ID NO: 50542 - DNA, 346 bp, Gossypium hirsutum
  Clone ID: LIB3197-024-Q1-M1-E12
ttttcttttacggtggttgtttgcggtgggtggacaacgatcatgatcgccgatcctaaatcttgtgacgttctgttggttttcgttttatttgcgattatatcctcttccagcgccttggtttccactccctatcctaaggccatttctgatttaaaagaggcagttgtgaagggattgggattccaagccgatgattttaagatttcagggttcgatctcagagatgcccttgtgggccattctgtggcatatgaattcgacattgaaatcgataacaaagtgattccttttaagctcttggaggatgtaaatcgttgggaatatgttgatttgcctattttta

SEQ ID NO: 50543 - DNA, 403 bp, Gossypium hirsutum
  Clone ID: LIB3197-024-Q1-M1-E2
aaaatggatggttattgtagcagaagggtaatcatgtttttggtgtttgcatttgcagcaataagcagagggtatggacaagaatcaaccactcttgttcctgcaatcatcacctttggtgactctgtggtagatgtgggcaataatgactatctccctaccatcttcaaggctaactatcctccttatggacgggactttgccaacaaaaagcctactgggaggttttgcaatggaaaattagccactgacatcactgctgaaactctggggtttacaacttatccaccagcttaccttagcccagaagcatcagggaagaaccttctgcttggagccaattttgcttcagctggctctggctatgatgacaaagctgccatggtgaatcatgccatcacat

SEQ ID NO: 50544 - DNA, 315 bp, Gossypium hirsutum
  Clone ID: LIB3197-024-Q1-M1-E3
agcgaggcgtgcgttcgacattggcccaaaaaaaaaagtccaaaacaattggagacagcgagacatggcagatccagtagtagcatcacacctgagcttagtgctcaaagctccccccactatttcttcgccttcccattctttaccgcaacaacactcaaagccaatggcttcctctctcaacagcgccgcctctttgcgtctcttcgtttcttcatcttcttcctcttcctccgccgccgttagactttgtctccgttccacttccctttctttctcttcttctcacaaaaccctcgctttctctcctttttt

SEQ ID NO: 50545 - DNA, 320 bp, Gossypium hirsutum
  Clone ID: LIB3197-024-Q1-M1-E6
gttgttttatgtctctccaattaatatgcagatcttctttaagaccctgaccggtaagaccatcacctttgaagtctagagttccgacacgatcgacaacgttaaggcgaaaatctaagacaaggaagggatccctccagaccaacaatgtattatctttttcggaaaacagttcgaagatggccggaccttggccgattacaacatccaaaaggagtacacctcttatttacgccttcgtctacatggtggcatgcagatgttggtcaaaacccttactggttagaccatagctttggtatgtcaaagctcttacacca

SEQ ID NO: 50546 - DNA, 354 bp, Gossypium hirsutum
  Clone ID: LIB3197-024-Q1-M1-E7
ctcactttctttaaaatacctattttctttctcactggtctccacacttacgtccaccttggaaaagcaggcagcgccaacaatgctttctctggtcttagagctcgctactcgtagaccttcctctggttcaggttctcaacttgatgatcaccattatttgtcatcaatacccaatggggatctcaaaaagaggaacaaatgtaaagtcaagttcgagttcgatgagaacaatgcccagatctttaggctgaaactcgaagacggtcatcttcaaacaaggctctttttcaatgagtatcgaaattctttcgttttctcctttctgggcatttcatgtttgtgtctttcaaa

SEQ ID NO: 50547 - DNA, 365 bp, Gossypium hirsutum
  Clone ID: LIB3197-024-Q1-M1-E8
cagaggttaaagagacggcgccaatcagctgtccgccttgactgaccgtccggcatcgtcttggccctcgattttgcccttttgtaaaccttttttttcaccaattcccgaaatggcagtgaaaccctccaaggccgataagaaaatcgcgtacgacgcgaaactgtgccagctcttagatgagtacacgcagatcttgatcgccgcagccgacaatgttggctcgaagcagctccagaacattctgaaaggtctccgaggtgactcagttgttttaatgggtaagaacactatgatgaaaaggtctgttaggatgcatgctgagaagactgggaacgaagctttccttaaccttatccctttgc

SEQ ID NO: 50548 - DNA, 210 bp, Gossypium hirsutum
  Clone ID: LIB3197-024-Q1-M1-E9
caatcctattcagaaaatcaaaatcccctctcccattgatcttttgatcttctagacacttctcttcctcgttgtgagtctcttggtttgccctggtaatggcgtctgctttagaaaccaaagccaaagaagcatacttcgatgaccactttgaactcgccctcgatctgtactcgcaagccatcggaatcaaccctaaaaagggcgagc

SEQ ID NO: 50549 - DNA, 179 bp, Gossypium hirsutum
  Clone ID: LIB3197-024-Q1-M1-F1
cttatctccaaagcttccccactaaacgccattgacttggccaagctcactcaacttgccaatcataactctctgtcttcccacattgaatctttttgttccttagccaatcttttctgctcattccaggaggaatcctcgaaactagacgcagttggcaagggtaaaagggaatccaa

SEQ ID NO: 50550 - DNA, 332 bp, Gossypium hirsutum
  Clone ID: LIB3197-024-Q1-M1-F10
cccacgcgtccgcttagaaggtgtcttaataaacgccttctttcttcttcttcttattcctttattgctttttagaatttttcttaatcgaaaatgagagagtgcatttcgatccacatcggtcaggccggtatccaggtcggaaacgcttgctgggagctttactgtctcgagcatggaatccagcctgatggtcagatgccaagtgacaaaactgtcggaggaggtgatgatgcttttaacacctttttcagtgaaactggtgctgggaagcacgtccctcgtgccgtcttcgtggatcttgaacccactgttattgatgaagtgagaac

SEQ ID NO: 50551 - DNA, 416 bp, Gossypium hirsutum
  unsure (1)..(416): unsure at all n locations; Clone ID: LIB3197-024-Q1-M1-F11
cagcaatctcaagggctttattctggcgatggtctctagcgccttcattggctccagctttatcatcaagaaaaagggtctccgaaaggccggtgtcaacggcccccgtgctagttctggtggatatggctacttgttggagccgctctggtgggttggcatgcttactatgattatcggggagatttccaatttcgttgcttatatctatgcacctgctgttttggtaacgcctcttggtgctttgagtatcatcgttagtgctgttttagcacatttcatgttaaaggagaaactgcagaaaatgggaatgttgggatgccttttgtgcatagtangttcgacaatcattgtgcttcatgctcctgaggagcgttctattagctcagttgaagaaatttgggaatttgctactc

SEQ ID NO: 50552 - DNA, 423 bp, Gossypium hirsutum
  Clone ID: LIB3197-024-Q1-M1-F12
cccacgcgtccgcggacgcgtgggttttttttttaaagaaaatgaactataagacctcctcttctgtttccattatcatcatttctcatctctgatcttggtaaactcttcattggtgggatatcgtgggacaccgatgaggaacgtcttaaggagtatttcggaaagtacggggaagtggtggaggcaatgatcatgagagatcgtgtcactggccgtgcccgtggctttggtttcgttgtctttgccgattctgctgttgctgagagggtaattatggataagcatatgatcgatggtcgcaaggttgaggcaaagaaggctgttcctagggatgatcaaattgttctaaaccggaacgtggttggtgtcactggatctaccggttttggacgaacgaaaaagatttttgttggaggtttg

SEQ ID NO: 50553 - DNA, 367 bp, Gossypium hirsutum
  Clone ID: LIB3197-024-Q1-M1-F2
ataatttcttccgttgatctttgttagagattagctttttaatttttcattatgggaaagatcaagatcggaatcaatggatttggaaggatcgggcgtttggttgcgagagttgctctccaaagcgatgatattgagctcgttgctgttaacgatcctttcatcaccactgaatacatgacgtacatgtttaagtacgacagtgttcacggtcaatggaagcatcatgagcttaaggtgaaggactcaaagacccttctctttggtgaaaagcctgtcacagttttcggtatcagaaaccctgaggaaatcccatgggctgaggctggagctgagtatgttgttgaatctactggtgtttttactg

SEQ ID NO: 50554 - DNA, 263 bp, Gossypium hirsutum
  Clone ID: LIB3197-024-Q1-M1-F3
ataatttcttacgttgatctttgttagagattagcttggtaatttttcattatgggaaagatcatgatcggaatcaatggatttggaaggatcgggcgtttggttgcgagagttgctctccaaagcgatgatattgatctcgaggcgggtaacgatcctttcataaccactgaatacatgacgtacttgtttaaccacgacagtgttcacggtcaatggaagcaatgtgtgcttgaagcgaatgactcaaagacccctctttt

SEQ ID NO: 50555 - DNA, 334 bp, Gossypium hirsutum
  Clone ID: LIB3197-024-Q1-M1-F4
cggacgcgtgggttcaccgtcctttatttttccaactaaggttaggctttaaactttaaaacattatgggtttagcagcagccctcctcttcctcctcctagcagctccggcggcttttgccgagcaatacaccgtaggagacagcagcggttggacctcgaccggagattaccaaagttgggttcaagggaaaacattcaccgtaggcgacacacttttgtttacctacggtggcagccactcggtggaggaagtatccaagagcgactacgataattgcaacaccggcaatgctattaaatcctacagcgatgggaacactgtcatcacact

SEQ ID NO: 50556 - DNA, 354 bp, Gossypium hirsutum
  Clone ID: LIB3197-024-Q1-M1-F5
cggacgcgtgggttctgatacaccaagatcagcatcttttatgcatccgtttgctgttggccacagttctggtgcaagagcagggagtttatttgctccgtgattgatccccccttacccaacgtagcaatgctcgggcccgagatagagttaaggctctccaggcgtactatgaacaacatccgagaacttagccaaccatacggacacccattgcttatggctccagaagagggagcggtcatagaagacatgctcaagctggacccgtagcctgataatctgaccaagtgggtggcttctattttattccgcctggtacattaggtcgaaactttcaagaggcataaaatc

SEQ ID NO: 50557 - DNA, 373 bp, Gossypium hirsutum
  Clone ID: LIB3197-024-Q1-M1-F6
cttattccttttatatttttcctctccaattttccgtcactttcccgagaaaatgagagaaatccttcacatccaaggtggccaatgcggcaatcagataggagccaagttctgggaagtcgtatgtgccgaacatggcatcgattcaacgggtcgatatggtggtgactcggagctccagcttgagcgaatcaatgtttactacaacgaagccagttgtggccgttttgttccccgcgcagttttaatggatctggaacccggtaccatggatagcgtaagatccggtccttacggacaaattttcagacccgataacttcgttttcggacagtcgggcgccggaaacaattgggctaagggacattacact

SEQ ID NO: 50558 - DNA, 359 bp, Gossypium hirsutum
  Clone ID: LIB3197-024-Q1-M1-F7
cgataattgctgatattttatttcaaatattggatatttttacttactttagatgtgatgcattcagttcttgggcaacaaacattggaaagatgcttcaagaatgtttgtgagcttgacattgtgttcaattacagcaaggttgtgtatcctctgatcacttatatatatagatagatatatatgtatagatttagtgccatggaaggttagattctacatgtaaacgagatctactgtcttcattggaataataaacataaagtacaagaggatggcacctaggtaaataggagttgatgttggaatatataaatatatgtggggggtatacttcaagattttacattttaattgat

SEQ ID NO: 50559 - DNA, 356 bp, Gossypium hirsutum
  Clone ID: LIB3197-024-Q1-M1-F8
cggacgcgtgggttcagatttcagatctgatcaaagaacaaccaaacaaacaggttgcttagaagtcccaagttagagaacatgggtcgtggagtcagcagtggtgggggacagagttctttgggttaccttttcgggagcggagaagctccacctccaaaaccaaccaacgtcacgagtactggcaccaccagtaatgaagttcctcagaagcagattgaggttgtgaaggaaactgtgcaaaaaccgaccactgcttcaccatcatccggtgatgccaaagagatccctgcaggtgttccagggagcaaaacgaacaactatttccgagctgatggccagaattgtggcaactt

SEQ ID NO: 50560 - DNA, 376 bp, Gossypium hirsutum
  Clone ID: LIB3197-024-Q1-M1-F9
atctcatatctctcctttgtttccccttttctctcttttttcaaccctaaccctacctcaccaaccaggattcaacatgaagggaggaaaatctaagtcagatactaagagtgccaagctatccgtgaaatccaaagctggaaagaaatcggggaaggctgccaaggatccaaacaagccaaagaggcctgctagtgccttcttcgttttcatggaggagttccgtgagcaatacaagaaggatcaccctaaaaacaaatccgttgccgctgtcggcaaagctggtggagataaatggaagagcttgtctgaagctgaaaaagcaccttatgtagccaaggcagaaaagcgaaaggtcgagtatgaaaagaacatg

SEQ ID NO: 50561 - DNA, 434 bp, Gossypium hirsutum
  unsure (1)..(434): unsure at all n locations; Clone ID: LIB3197-024-Q1-M1-G1
gccaattgtttgagctagctagctcttactcaaatggcaaccaaaacgatgatgttgcaaatattttcacttttcttctttttgttcagtatctgcaactccattttccttggtgctaatggagatgacaatggtggttggcaaactgcccatgccaccttctacggtggtgctgatgctaccggcacaatggggggagcttgtggttatggaaacctgtacagtcaagggtatggaacgagcacagcagctttgagcactgcacttttcaacaatggcttgagctgcggtgcctgctacgagctccggtgcaacaatgatcctcaatggtgcattagtcgaaccataaccgtgacagccaccaacttttgtccccctaactatgncttatctagtgacaatggcgggtggtgcaatcccccacgagaacactt

SEQ ID NO: 50562 - DNA, 405 bp, Gossypium hirsutum
  Clone ID: LIB3197-024-Q1-M1-G10
gaaggaacatggttgatgctttagaacgaattggcctcaagaaatatttccaggcaataatttctgaggaagatggtatggagtcaatagctcatagatttttgtcagcagctgtgaagctggatcgtaaaccatctaagtgcgtcgtgtttgaggatgatccacgtggcattactgcagctcataactgtacaatgatggctgtggcattgattggctcccaccctgcgtacgatctagggcaggctgatcttgcagttggtagctttaatgagctttcagtgattaatcttcgaagattatttgctaacaagggttctactttcatggaccggcaaaagcagatcatagagaagactcctccgaaaaggaagcttacagttgataccatctttctgatcattt

SEQ ID NO: 50563 - DNA, 418 bp, Gossypium hirsutum
  unsure (1)..(418): unsure at all n locations; Clone ID: LIB3197-024-Q1-M1-G11
ttcttaattatttctctatctcttgcaatatgcctccagcctcgcccgatttctccagctctgtcaagcttaagtatgttaagcttggctaccaatacgttgtggatcattttcttactctcttgttggttcctgtcatggttggtatccttattgaagttgttcgtttaggccctcaagagattgttaacctatggaactccctccattttgatcttattcagatattgtgctcttctttcttcatcatttttattgccactgtttacttcatgtccaagccacgatgcatctaccttgtggattatgcatgctacaagcctcctgtgacttgcagggttccttttgctactttcatggagcactccaggttgattntgagcaacaatcctaagagcgtggagttccagatgaggat

SEQ ID NO: 50564 - DNA, 419 bp, Gossypium hirsutum
  Clone ID: LIB3197-024-Q1-M1-G12
cctccatcacccatcccaaccgccaccggctcacgatccgctgccaacgagatcttaaccgactttctcgagaagtcgttacagatccccgacctaacgctacccgagtgccagacactccgccaccacggcctacccgataaggtcgatttccaatcccttggtttaagggaggtggggtcggtcgagcggtttatgcgatctgcacggaagtatggagtggtggcgatagggctgcatgggatcgatgcgggggaggaggtaagggcgacggtgaaagaggcggcgagagtgttcggtgtgttggaagagagagatacgggatacaggaggaattcggcgggaaagagggagggagatgtgtggattgattgcaaagaccagaggatggagtgggctcgccaatatatcggcgttca

SEQ ID NO: 50565 - DNA, 363 bp, Gossypium hirsutum
  Clone ID: LIB3197-024-Q1-M1-G2
ggcaggcaggcctatatttcttggtttcaataggactccttacgagcgttgattctatctactattatctaaaaataatcaagttattaatgactggacgaaaccaagaaataacctctcacgtgcgaaattatagaatatcccctttaagatcaaacaatttcatcgaattgagtatgattgtatgtgtgatagcatctactatacctggaatatcaatgaacccgattattgtaattgctcaagatacccttttttagtttagcttttagttagcttctagaatctatttcttagttcaaggtccctctttactaactggaatcaaagaattagtagatctgttctgcccaaaatgggaat

SEQ ID NO: 50566 - DNA, 204 bp, Gossypium hirsutum
  Clone ID: LIB3197-024-Q1-M1-G3
cccagccacccgttggtagacgcttttccccccccgcggcggcggtttagctttgatgggattattcctttcccaaacctaaatcatgtgctggccccggaaccaaatcttccttataggtctatagaaaccgaccggtggatgttttcccgcacatcactccaataagctgattagggagttgcatttgtttcctaaagggga

SEQ ID NO: 50567 - DNA, 393 bp, Gossypium hirsutum
  unsure (1)..(393): unsure at all n locations; Clone ID: LIB3197-024-Q1-M1-G4
caaacatctaggccttgtttggttcacatgaatggcttagccattcctcccttattcaacacaatgatcttattcatgggtttggttggctgtaaagcctattcaatggaatagctattacagccttattcctcaaaatcactgaatagcaattcaacgtcatcactaatgaatggctattcaacgcttccagtaatacaaaaaattatttttctttccttttccacccatctcacatctcttcaaattccctacttctatctgagagtttttcaacaaatctatcgtgcgaacgtttggagtgagcaagaagaggggtttgaaaaaccagcagcaacagccatggtgaagaagattagcgtcacanataaagccttgattccaggtttaatc

SEQ ID NO: 50568 - DNA, 390 bp, Gossypium hirsutum
  Clone ID: LIB3197-024-Q1-M1-G5
cttcccgtaagaatctcttacatggtgtagttttgtctggtggaatatgtcctattaccaagaagatgatgctgaatacatagcagaagagtatgacatggaggacatagatgacatggatgaagagttctgcggcagagatatgtctggctcggagtctgatgttgatgaatttgattactcgaataataaaatatctgatacttctgctgctgaagctagaagaggaaaagacatccagggaataccttgggatcagctcagcatcactagggaaaaatacaggcaaactaggctagaacagtacaagaactatgagaatatcccccactctggggaagtgtcagggaaggattgcaagattaccaagaagggtgcctcatactatga

SEQ ID NO: 50569 - DNA, 390 bp, Gossypium hirsutum
  Clone ID: LIB3197-024-Q1-M1-G6
ttctcaccggaaatcatttccgcttcttgcaagcagccgatcaaaactaacagcttaatacagcagcatttccccctcatttttcaattaaaatcccaaaatggtaataaattttgtctgtgtttttttagtttcagttctggtactgagtttgggagtaagctcggaaccagttgaagacaagcaagctctccttgctttcctttcacagaccaaacacgagaaccgggttcaatggaactcatccacctcagcctgcgactgggtcggtgtcgaatgcgatgccaaccgctctttcgtctacactcttcgtctcccaggtgtgggcctcatcggttctattcctgccaacacagtcggtaggttaaaccaactccgagtttaagtcta

SEQ ID NO: 50570 - DNA, 401 bp, Gossypium hirsutum
  Clone ID: LIB3197-024-Q1-M1-G7
ccaaaacaatgggttcaaccggtgaaacccaaatgactcccacccaagtctcggatgaggaagccaacttattcgccatgcaactcaccagtgcctcagtccttcccatggtcctcaagtcggccatagaacttgacctgctggagatcatggccaaagctggcccaggtgctttcctctccccaaaagaattggcttcccagctccccaccagcaaccccgatgcacctgtcatgctagaccgcatcttgcgcctcctggctacctactccatcctcacttgctccttgcgcactcttcctgatggcaaagtggagagactctatggtcttggccctgtctgcaaattcttgaccaagaatgaagatggcgtcactctttccgcccttagtctcatgaat

SEQ ID NO: 50571 - DNA, 393 bp, Gossypium hirsutum
  unsure (1)..(393): unsure at all n locations; Clone ID: LIB3197-024-Q1-M1-G8
cttgtatcatcactctcccaccccgaccgcttgattttgatcagacggtaatcatgccgatcagaaacatagccgttggccggcctgaagaagctactcatccagatgctcttaaagcagctttagctgagttcatatcaacgttaatcttcgtttttgctggatctggttcaggcatggcttttaataagctgaccgacggcggtgcaacaactccggctggtctcgttgccgcctctctagctcacggatttgcgcttttcgtcgctgtctcagtcggtgctaacatctccggtggccatgtgaatcccgccgatacattcggtgctttcgttggcgggaacattactctnttacgtggtatcctttattggattgctcaactccttggct

SEQ ID NO: 50572 - DNA, 367 bp, Gossypium hirsutum
  Clone ID: LIB3197-024-Q1-M1-G9
gaaaagaagaggaaaaaccagacaaacggcgagaccccaacttttatttctattttccttttcccttctctgtctcatttctttttccgccgccgattcctccatcacagccgacttacgtctcaccgattccagtttcccgtcggttcatgcgaagaagctgataatggagacgcacacgcttcctaaaggggaagtcaatgtcgttcacgaacaccggctttcgttgccggagggtcccaaactggtggagaagcggttcaagttcccaactttggaagtgcccggtggagtttcctttgaggatatgggtcaccatgctgggtattacaagcttgctaattctcatgatgccagaatggtctac

SEQ ID NO: 50573 - DNA, 334 bp, Gossypium hirsutum
  Clone ID: LIB3197-024-Q1-M1-H1
tagtgaatgtagactgttctgaaggggacgagcgagcgctaaaagatgttttatcgttgcaaaatcctcaacgttaacttcccatcatctgtgtctctgggaactttcgtcaaacaccttccattttccaaacctaaaacctcatttcctcctcaaagactcaactttaaatctctaaccaccaccactacctgcgtaacacgcagctcttcctattttgaaaccttaaactcccgccaaaaggaccagattcatctctacgtagacgctttacttcaatggaaccagaagatgaatctcaccgctgtcaatgaagttaatgaagtaatggaaa

SEQ ID NO: 50574 - DNA, 412 bp, Gossypium hirsutum
  unsure (1)..(412): unsure at all n locations; Clone ID: LIB3197-024-Q1-M1-H10
tagctatctatttattccattagatcaagacttttacttaattgcaaacctttgatgcctagctatctatttgttcgtaattttgattaaaatattattccctctcttgtttatgaggatgggaaaatgggttttcgaaggggaaggtagcgaccatctgtttcactccatgtctgttccttgtgagcttattcactgttcattattgtcctctttagtaaatgagttttgagatttttgttagaatttgtttaacacggctcactaagtcaatagagaatagattcctattatacattaggtctagactttacttagttgcaaacctttgatacctagctntatctttgttcataaaagatgtgccttgtttaagtgtcttttttttttctacttttgatgatgtgtgcac

SEQ ID NO: 50575 - DNA, 416 bp, Gossypium hirsutum
  Clone ID: LIB3197-024-Q1-M1-H11
caaggttaccctgcttgttgtcctctcatgtgtggtggctgcctcggggggacttatctttggttatgatcttggagtttcagggggagtaacctctatggaccctttcctcaaaaaattcttcccgaatgtgtatcgaaggatgaaagaaggtaccaagattagcaattactgcaaatttgatagccaactgttgaccttgtttacatcttcactctacctatctggccttgtttcttctttatttgcatctactgtgactcgagtctttggacgaaaggcgtcgatgcttgtagcaggggttgctgtccttattggttcagcccttggtggcgctgcttctaatctctacatgcttgtatttggtcgtctttttcttggaattggacttggatttggcaaccagtcgatcccac

SEQ ID NO: 50576 - DNA, 389 bp, Gossypium hirsutum
  Clone ID: LIB3197-024-Q1-M1-H2
gaaacatattgggtttccttttcttgatattggcttcactaacaagcctctcttctagccttcctagtgaatactccatagtggaacatgagattgacgcatttctttcggaggaaagggtgttggagatcttccaacagtggaaagaaaagcatcggaaagtgtaccggcacgccgaggaggctgagaaaaggtttgaaaatttcaaggggaatttgaagtatatcctagagaggaatgcaaagagaaaagcaaactaatgggaacatcatgtgggattgaacaagtttgctgatatgagcaatgaggagttcagaaaagcttacttgtcaaaggtgaaaaagcccatcaacaaagggataaccctgtcaaggaacatgaggagaaag

SEQ ID NO: 50577 - DNA, 292 bp, Gossypium hirsutum
  unsure (1)..(292): unsure at all n locations; Clone ID: LIB3197-024-Q1-M1-H3
caaacagtgagtgagtgagagagagaggagtctgctatttgctaaggtgcagtttggagtggttttcataatggaaagaggtgcaaggatgctgttgatctcagtcatggtcctgctggtccttgcttcaaatgctgaagggagaagactcaaagaggaagcttaccaccctcagaacttcctcggagcctttggtactagtggtgggctagttccaacccctggtggaggtgttggccttaatttagggccgtcagtcttttgttcctatcctgngaccggatgtgttcgt

SEQ ID NO: 50578 - DNA, 285 bp, Gossypium hirsutum
  Clone ID: LIB3197-024-Q1-M1-H4
gtttgagattggaagtgaaactaaaataactgagttaatatggcgggccaagttccgagtcgacaattattatcgatggcgagtggagagagcccattctcaagaagcgactcccaaccatcaatcccctactgaagagagcataggtaacattccagcggctacagctgatgacgtggagcttgcggtggcggctgctcggagagctctttctagaaacaaaggtgaggattgggctaccgctcctggcgctgtccgtgccaagtatttacgtgccatcgctgc

SEQ ID NO: 50579 - DNA, 387 bp, Gossypium hirsutum
  Clone ID: LIB3197-024-Q1-M1-H6
attttctctcagggaagtaagttatccggtttgactgtttataagcattacaaaatgtttttcgatagatatggttaccatgggacgtcatttgagcagagttatcgatgttaccctgcatctttcattgaaaagccacaaattgaaagcggtgataaaattatcatgcctccatctgcacttgatcgcttggctctctgcatattgattatccaatgttatttgaacttcggaatgatgctgctgagcgtgcctctcattgtggagtgctagagtttatcgcagaagaaggcatgatctatatgccatattggatgatggagaatttgctcctacaggagggagatattgtgagggtgaaaaatgtaactcttccaaaggtaccta

SEQ ID NO: 50580 - DNA, 410 bp, Gossypium hirsutum
  Clone ID: LIB3197-024-Q1-M1-H7
ctacaacaaattttacgatgctttttcgaagaatctgaagttgggtattcacgaagacagccaaaaccgggctaagttggctgatttgctccgataccactcgacgaagagcggtgacgagttgacgagcttgaaagactacgtcaccagaatgaaggagggccagaaggatatttattacatcactggtgaaagcaagaaggccgttgagaactctccgttcttggagaaactgaaaaagaggggatacgaagttcttttcatggtggatgccattgatgagtatgcggtcggacagttgaaggaatacgacggtaagaagcttgtctctgccacaaaggaaggtttaaatctcgaggacgagacggaggaggagaaaaagaaaaaggagggaaaaaagaagtcttttg

SEQ ID NO: 50581 - DNA, 138 bp, Gossypium hirsutum
  Clone ID: LIB3197-024-Q1-M1-H9
gccaatcgtttgagctagctaactctgacttaaactgcagctaaaactataatgtttcttatatttccacgttgcgtctggttgctcatgatcttacacatcatcctgcttggcgctcgcttcagatgctcatgggag

SEQ ID NO: 50582 - DNA, 351 bp, Gossypium hirsutum
  Clone ID: LIB3197-025-Q1-M1-A1
ctgctttgccggtttccgctgtcttcttatgctcttccatgttggtctctttaattgctctcttggtgcattgaattcaaagcttttcaagactatatgacattggctacccttaatttcattctcactggtgatgaggggagtagcctctaatcttcttcgagataatatttgggtgttatcaattttcaatttctctattcctaaagttttagatactttgctttgctttttgtaataataatattttttttgggtggctgaataagttggttgagattaaaggtggtaatattgttacgccattgtttaagttttttttaaaaaaagtgatattagaattacaagctt

SEQ ID NO: 50583 - DNA, 408 bp, Gossypium hirsutum
  Clone ID: LIB3197-025-Q1-M1-A12
ctcgattctacttaacgcaaatagttcgagtttcgtaatcaatggctttaccgaaccaacagactgttgattatccgagctttaagctcgttatcgtcggcgatggaggcactggaaagaccacatttgtgaagaggcatctgactggagagtttgaaaagaaatatgagccaacgatcggtgtggaggttcaccctttggacttcttcactaactgtgggaaaatccgattctactgctgggatactgctggacaggaaaagtttggtggtcttcgagatggttactatatccatgggcaatgtgctataattatgtttgacgttactgcccgtttgacatacaagaatgttcctacctggcaccgtgatctttgcaaggtgtgcgagaatattcctattgttctat

SEQ ID NO: 50584 - DNA, 385 bp, Gossypium hirsutum
  Clone ID: LIB3197-025-Q1-M1-A3
aacaattctaaaaggtgaaacatgtcgtccgacgggaacgtcaccggcggcggcggcgctaacaccgtcggcgtaaccaataagcctttcttttgttaccaatgcaaccgtaccgttaacataacaatatcccctccctcttctgatccgacttgtcccatttgcaacgagggtttcctcgaagaatacgacaacccaaaccctaatcaaggctccggtttcctaaacccgaatccgaactcaatcccgttccatgaccctttcttgacgttatcggatccgttcgcttccctccttccgctcctttttccgtcctcttcatccacaactacctcatcctctgcttctattgaccctaataaccctagcctatctgggccgaccc

SEQ ID NO: 50585 - DNA, 339 bp, Gossypium hirsutum
  Clone ID: LIB3197-025-Q1-M1-A7
gttcttccattttttaatcaagttccccccaccccgctcaacacctctccctctaacaagccaaaggccccaagcagattctatttgttctaacatggagaaaagccatgaacttgaactgacccagatgaggaaatcagtagagaaacttgggttttcaacagagaaatacggggatccgacactcatgagattcttgattgcaagatcaatggacacagataaagcttcaaagatgtttgtccagtggctgaaatggaggtcttctttagttcctaatgggtgcgttgtagaatctgaagtgcctgaccaattagaagccagaaagatttttttgca

SEQ ID NO: 50586 - DNA, 369 bp, Gossypium hirsutum
  Clone ID: LIB3197-025-Q1-M1-A8
attagatacggtaaatttccagagcagcgtatgcacttaaatggtggaagtaccatggaagatttacatgggaaagatagaaatgggaaatatacaccttttgatgttgaaaatgagtatgttggggatggaagatcatcaaatatcagtgttgatggagccaattctactggcagcccaaaagcatctagcaactctatttctactgcagatgtgttgaagacattgttctttatacttgtatggtacactttcagcacatttttgacattgtacaacaaaaccttgttgggagatgagttggggaagtttcctgctcccttgttgatgaatactatccacttcgcatttcaagcttttatcaaatgc

SEQ ID NO: 50587 - DNA, 436 bp, Gossypium hirsutum
  Clone ID: LIB3197-025-Q1-M1-A9
cccacgcgtccggatcaatttgactaggaacggatcacagagactgagagtgaagacacccacccaatcaaccttgtgaaaatggcgacaccccaattcctatcatccttccggtactccgacagtctaacagtcgtagctatctccttttgcactgccattgtctgcgaagccatctcatggctcttaatctaccgcaccaactcttacaaatccctcaaatcctctatcgacaaagccgccaagaaactcgaaatcatgaaaaccgaccaaaaccctagcaagttatccaccaaaaaatccaaaaccaagaagatcgaccgtgtcgaaaccagcctcaaagaatccagccgtgacctttccttattcaagttcaaatctggggctgtcgtcgccctcgttttgatcgtcgtttttggcttcttgaattctcttt

SEQ ID NO: 50588 - DNA, 364 bp, Gossypium hirsutum
  Clone ID: LIB3197-025-Q1-M1-B11
tttagagttaagcaaacgtgagagtattatattcaattgcaaaaagttttagaactatgaagcaaatgaagttggaacctgacattgtagttgataaacctaaacaagcaaccctgccgcctccgccgccacttccacgattctgggcgaggaagactagtgcagacagtgtaacaaaccgagagattgctaagttctggaggcagaagcatgccgaggaagaggatcacctcctagctgccatcaaagctgcagcacgcaaaagggcctgcaatctttcggaggaagactacaaatgtttcatggagtcactaagtgatgaaaattatgaaacttaaccgaattttacaagccccaccaaata

SEQ ID NO: 50589 - DNA, 419 bp, Gossypium hirsutum
  unsure (1)..(419): unsure at all n locations; Clone ID: LIB3197-025-Q1-M1-B12
gtggtttaagggatttttttcattcgtttcttctcacgctcgattaccttacaaaaagagaaaatgaccaagtgttacccaactgtgagcgaggaataccagaagtcagttgaaaaggccaagaggaagctcagaggtctcatcgctgagaagaactgtgctccactcatgctccgtttagcgtggcactcagctggaacttttgatgttaagaccaagaccggaggtccattcggaaccatgaagcatcctgctgagctcgcacatgctgctaacaacggcctagatatcgccgtcagacttctcgagccgatcaaggagcagttccctaacctcacctacgctgacttctatcancttgctggtgtcgttgccgttgagattactggtggacctgaaattcccttccatcccggaag

SEQ ID NO: 50590 - DNA, 440 bp, Gossypium hirsutum
  Clone ID: LIB3197-025-Q1-M1-B2
ggaagagctgtcctttttctctctctatattttctcatctccttttccaccgccgttgatctcgatccgtatccccgttttcaaaaaagctccaaaaagatggccaatgctgcatcgggaatggctgtgcatgatgattgcaagttgaagttccaagaacttaaggcaaaaagaacccaccgctttattgttttcaaaatcgaggagaagcagaagcaagttatcgtggagaagcttggtgagccaactgagagctatgaagattttactaaatgtcttcccgctgatgaatgtcgttatgctgtgtacgattttgattttctaacagccgagaacgtcccaaagagcagaatctttttcatcgcatggtctcccgatacatcaaggatcaggagcaaaatgatatatgctagctccaaagacagattcaagcgagaact

SEQ ID NO: 50591 - DNA, 424 bp, Gossypium hirsutum
  Clone ID: LIB3197-025-Q1-M1-B3
acgctttgtagtagctgttttctctcttttagttattggtttttttttcgttctttatattcttttttgtcgacacaacaaaagaaaatagtgatggccggtaaaggagaaggtccagcgatcggtatcgatctcggaactacttattcatgcgtcggtgtttggcaacatgatcgtgttgaaatcatcgctaacgatcaaggtaacagaacgacgccgtcttatgttggttttaccgacaccgagcgtttgataggtgatgctgccaacaaccaacttgttttgaaccctatcaacaccgtattccttgcacaaagattgattgtacatcaattcaaggatgcttctttataaagtgacactaaattgatggacgtgctggaatagcagcagagattttgatgctgaaaccgcttataattta

SEQ ID NO: 50592 - DNA, 436 bp, Gossypium hirsutum
  Clone ID: LIB3197-025-Q1-M1-B4
cggacgcgtggggtttatttttaatattaatattaatttttttactataaataagatttttgaaggttggccaggacattggcggtgttgtgattaatattattgaacctttttaaatctcattatataaattttattattgttaattgttaatttcgtagaatgaaccaagaattcttaacttcagaggtcatagtcataagcttatatatatattaatgttggcattatttagagttaggaggaaggaaagcagtgaactgagggtccatttgataacccgatgaagagtttttagttggtccattctcatgctgtgaacctggcattattttttttaagggtaatgagttttgtgatggcacaaaaaatccattgggcacgtaaattgttctaaaaaaatatggtggttagcttatcttagccgagtaagaaa

SEQ ID NO: 50593 - DNA, 404 bp, Gossypium hirsutum
  Clone ID: LIB3197-025-Q1-M1-B5
ctcaggctcaggctcaggctcaagccggcccagtttcaccaccaaagaaacctatgaaccctatgtcacccctgttagattccaccctgatgaaccctataacagcatccccgaatcctccaacaataaagacacttactactacaacaagaatgcctacaagtccactaagcagcaaaacttgggcgaggccattttcaccgagaaaggatggagcaccaaggaaaaccagaacaacaactactacaacggcaacattaatggcgagaagcaaggcatgagcgatactaggtacttggagaatggaaagtactactatgacgtcaagagtgagaacagctattatccaaaccagctcgacaactcaagaggagttgcttccaggaacgagttcgatgagaatc

SEQ ID NO: 50594 - DNA, 414 bp, Gossypium hirsutum
  Clone ID: LIB3197-025-Q1-M1-B6
cggacgcgtggggcaagccccaaagtgaagaagtttatgaacatcattatgaccaaactgcaggggagtggcgatgacggtgaagggggtggtttcatggggaaggttgggaatctggcactacagtttcttaaacaaaagctggatgatgacgaaggatacggtaaaccggcacttgagactgaagtgagtagcaagcaagaggcttatgcatgagctggtaagcactctcttcctgacagtggaattcttatcagcggctgccagaccgaccaaacttcagcggatgccagcccatcagggaatgcaagcaaagcttatggagcacttagcaatgctattcaaaccataattgccgactcagatggctcaattactaataaagagcttgttctgaaggccaggcagatgctc

SEQ ID NO: 50595 - DNA, 437 bp, Gossypium hirsutum
  Clone ID: LIB3197-025-Q1-M1-B7
gaagagagtgaacaaaaatggagatggttaagtgttttatgattgtcctgattctgggtctttgccacgtgtccatggttgcaccattggaggagaagaagagtcacagaaagacttacatcgtgcacatggctaaatccgagatgcctccgagtttccagcaccatactcactggtatgactcctctttgaaatcagtttccggctcggctgcaatgctctatacctacgacaacgttatccatggattctctactcagttaactgacaaagaagctgagcaactcgagagccaaccagggatcctcgcggttttacccgaagtaagataccaattacacacgactcgtacacctgagttccttggactcagtcaagctgctgctttgttccctgagtctgagtcggcgagtgaagttgttattggtgtgttggat

SEQ ID NO: 50596 - DNA, 421 bp, Gossypium hirsutum
  Clone ID: LIB3197-025-Q1-M1-B9
agaaggccttgagaaagcagcaccattcctgaaggcccttattgaaataccgtttattaaatcggttatccaaggttttctacctggtattgttttgaagctctttctcatttttctgccaactattttgatgatcatgtccaagtttgaagggttcacatcaatatcatctttggaaaggagatcagcaactagatactatctctttaatttagtgaacgtattcctcggcagcgtaattgcaggcagtgcactggaccagctaaacacgtttcttaagcaatcagcaaatgagattcctaaaacaattggtgtagctgtaccaatgagagcaactttctttattacttatatcatggttgatggatgggctggaatagcagcagagattttgatgctgaaaccgcttataatttaccac

SEQ ID NO: 50597 - DNA, 438 bp, Gossypium hirsutum
  Clone ID: LIB3197-025-Q1-M1-C1
tatcgccaaccactgctattcgataccattgaaacgtcactgctttcagttgggatccaagtttgttgttgttgatatcgagtcaataccatcctcctcggcaacagtggagttcgcttctccttatctgcgcttcttcaagcgcacttcatgaccatgatcctttgtcctcaattttctcttgggtctcgctcgcagatccaccgccaccgccaccgccactacaaccaaaaccgatttcctaccttccgtttctcttctcgatggatcccacttctcgccccgctgtcgtcatcgacaacggcactggatatactaagatgggatttgcgggtaatgtagagccgtgttttattcaacaaacagtagtagcagttaacgaatctcttctaaatcaatctagagcttcttccaaatctaattggttagctcagtatt

SEQ ID NO: 50598 - DNA, 287 bp, Gossypium hirsutum
  Clone ID: LIB3197-025-Q1-M1-C10
gtaaaaagaaatgactcattatttataaattataataaaaaagtatttcaataatgaaaaccataaatatcatggtcaatcatcaacaatcaaatttcagacattatggatatcacctctagagttcaaacttaatagtttggttcactataggaaatgtgtatattataggctaatggcacttgctcgcctatttcacacataaagccagcgggcgccactttgctacctcggcataaaacgctcatgggccttatataagtaatatgtcaattccagttttaata

SEQ ID NO: 50599 - DNA, 416 bp, Gossypium hirsutum
  Clone ID: LIB3197-025-Q1-M1-C11
cttttccatccttttatttttacaattttcttttcccccgctcctgattttccttccctccagacactattgcaaatgttgccatttctccctcttggaggcattgattggtgacgggcgatttaattcttttttttttctctcaaaagagaagtttaatggaattaaagataaaaaggggttgatttttctgtcctggaggctagctttcccgggaaattttgcctccttttttcaaatactctctctctctcagctgccaccgttagttgcatttttttccccattcagtcctctgttttctagaaaatttatatttcggaacttttctttttgatccatcgatccaagaagaatttatgtagtcgtggatggatttaaaatgtaacggaaggaaaatttcattggaggatcta

SEQ ID NO: 50600 - DNA, 409 bp, Gossypium hirsutum
  Clone ID: LIB3197-025-Q1-M1-C12
attcttattccttttatatttttcctctccaattttccgtcactttcccgagaaaatgagagaaatccttcacatccaaggtggccaatgcggcaatcagataggagccaagttctgggaagtcgtatgtgccgaacatggcatcgattcaacgggtcgatatggtggtgactcggagctccagcttgagcgaatcaatgtttactacaacgaagccagttgtggccgttttgttccccgcgcagttttaatggatctggaacccggaaccatggatagcgtaagatccggtccttacggacaaattttccgacccgataacttcgttttcggacagtccggtgcgggaaacaattgggctaagggacattacactgaaggagcggagcttatcgattccgttctcgac

SEQ ID NO: 50601 - DNA, 426 bp, Gossypium hirsutum
  Clone ID: LIB3197-025-Q1-M1-C4
gctacatcgttcttggcgtctcttttcttcaccttttgggcgctgcttatttcaccggcgatttccctcacctgttcctcccagaagtttacgaaaaaccaagtttactccaactgcctcgaccttccttctctcgcctcttacctccacttcacttacgacccttctaacactactctctccgtcgccttcatctctactccttccaaacccggcggatggatttcctgggccataaatcccaacgccaccggcatggccggttcccaagcactcgtcgcttacaaaaactccaccaccggcgttgccgtcgtgcatacttttgacatcagctcttattcttcaattgtgccgaaggatttgtcgttcgaagttccagataagacggcggagactagaagcgacgggagcctggccattttcgct

SEQ ID NO: 50602 - DNA, 420 bp, Gossypium hirsutum
  Clone ID: LIB3197-025-Q1-M1-C5
tttaagtgtttctatagggttttaattcgttcttctcattacctctcttttaacctttctcttttttgcttgctctctttgtttttcgagatctgtccgttttcttcttttcaattagcttcttgaaagctttattttcttaagaacaggaaaccgctgaagagatggcaccaccaattgagactccaaccaagtcctctggctctcaccacgcttcacatcctcctttgaatgaaaggattctttcatcgatgagcagaaggtctgttgctgctcacccatggcatgatcttgagattggacctggagctccaatggttttcaactgtgtgattgaaatcccaaaaggtagcaaggtgaaatatgaacttgacaagaaaactggtctgatcaaggttgatcgtgtgctttactcatcag

SEQ ID NO: 50603 - DNA, 426 bp, Gossypium hirsutum
  Clone ID: LIB3197-025-Q1-M1-C6
agaaaacaaagaaaagaaaagggttttcctccattttctacttatctttttcattttttcttcattttaatttcgaatttagggaaaaatggccaatttcatcgaatttccaatctaatttcccattaatattttttattttaaattctcgtttctaaatttatttttttttcagtcatttcaaccatggcttccaattcgaagaagcccgctactgctgatgagaaatcggctttggaaacggagagcaaaagttcaaagtctgaaacatcctccactgagaagaaaacttcaacacctgagccttcaactgggggttcacagccagcacaagcaggggccttccctcccaacgctatgcctggtcctgggtttgtcccacccaatccatttgatttctcagccatgagtggccttcttaatgat

SEQ ID NO: 50604 - DNA, 411 bp, Gossypium hirsutum
  Clone ID: LIB3197-025-Q1-M1-C7
aaaaaatggagttttggggagttttaatttctggggttttagtttcttggtgggttttgagtgtaaatggtgctaatttaccaccatgtcaattccctgctatttacaactttggtgactcaaactcagacactggtgggatttcagctgcttttgaacccattagagctccatatggtgtgccctattttcacaaaccatctggtagagactctgatggtcgcctcatcattgacttcatagctgagagacttaagttgccatatcttcatgcatatttgaattccttgggagcaaatttcaagcatggagcgaattttgctaatggtggatcaaccataagaagaccgaatgaaaccatttatgaatatgggataagtccatttggtttagatatgccaattatacaat

SEQ ID NO: 50605 - DNA, 431 bp, Gossypium hirsutum
  Clone ID: LIB3197-025-Q1-M1-C8
taatcagctaaccccttgtcaatgctgcctcttctgctgtgcattctgggccatatggggagactgaaataaatgaatacatgagaaaacagttagtactgggaaggacattacaaagttcatcaatagttacatacatgaacttaacggtatcgaagaaagaaaggtagaaaaaacaacagaacccaatagatgggaacacccaactggcgaagtcataaaaattaaaggtggggttgattggaataaaacattttccggaaaaaggtttcaaccttttcccggggttggttggctgaaaatattttccccatgtaaaatcaattacaaacacgggaaaaagaagtgttaaattttggaaaatgacttaccgtttctaattcggtaagacattttcaggaaaattttagacaccgatcttccctttccct

SEQ ID NO: 50606 - DNA, 409 bp, Gossypium hirsutum
  Clone ID: LIB3197-025-Q1-M1-D11
gtttctcactgttagatgctctctccctctcacctcggacgatgccgccactgggttggcggagaggccatggaaggttgcggatgctaggctggttcttgaagatggttctatttggaaggctaaatcttttggtgtctctggaacccaagttggtgaagtggttttcaacacttctttaacagggtatcaggaaattctaacagatcctagttatgctggtcagtttgtcctgatgaccaatccacatattggcaataccggagtaaattttgatgatgaagaatcgaggcagtgctttcttgccggtctggtgatcagaagtctaagtataactacttcgaattggagatgtgcggaaacccttggtgattatttagcagaaagaaatataatgggaatttacgat

SEQ ID NO: 50607 - DNA, 386 bp, Gossypium hirsutum
  Clone ID: LIB3197-025-Q1-M1-D12
cccacgcgtccgaaaagaggcaatgagagtagtatggacattataggtggtcaatctgaagttgacgataaatctgtcaactctaagaaatttgaggagcaagttttcaaggatgccgctaaggaatctgctactgataaaacgaaggataagaaaaaaaagaaaagcaagtcaacttctgattctttaattgaaagtgttggacagcatggttcagaggacacgcaacatgctgcagttactttgaatgctagtgacatatcagtggaagacaagacttccaaatctaaaaagaagaaaaagaaggatgattctgaagatgtagagaaagaaaaatccacagaggaaaataagatctcgaaggtggattcaacgatcacagatga

SEQ ID NO: 50608 - DNA, 395 bp, Gossypium hirsutum
  Clone ID: LIB3197-025-Q1-M1-D5
cggacgcgtgggcatttatccaccatatgggttcccaacttacagtcctgaatacgggtatcaccaagctctctataatccacaaatccagcaggcacaatactatcatcaactgtatggttcatcatcaacctcaatggggtctccatattattttggctactctttgcaagctcccaggggaacattttctgcaccccaggctcaacgtatccccggaccgtcctatctttactatccttcacaaatggaggggtccttctccacctatcctcccccaccttttcatcccactaggcatccaattccatctgctgcagattcacagactcctcaacctacctccacagaatcagaatctggggccatcacttctgaaagtccaaaaacctaaa

SEQ ID NO: 50609 - DNA, 437 bp, Gossypium hirsutum
  Clone ID: LIB3197-025-Q1-M1-D6
tctgtttctggtcaagccaatctcaaaagactccccttttagctcacagctcctctcttgagtactataatgggtaaggagaaggttcacatcaacattgtggtcattggccatgtcgactctgggaagtctacaaccactggtcatttgatctacaagcttggtggtattgacaagcgtgtgattgagaggtttgagaaggaggctgctgagatgaacaaaaggtcatttaagtatgcatgggtgcttgacaagcttaaggccgagcgtgaacgtggtattaccatcgatattgccctctggaagtttgagactaccaaatactactgtactgtcattgatgcccctggacatcgtgacttcatcaagaacatgattactggtacctcacaggctgactgcgctgttctcattatcgactcgaccactggtggttt

SEQ ID NO: 50610 - DNA, 432 bp, Gossypium hirsutum
  Clone ID: LIB3197-025-Q1-M1-E10
cggacgcttgggttgggttgtgcgactggccaccctagctttgtcatgtcatgctctttcaccaaccaggtgatcgcccagctcgagctgtggaaggagaaggcaaccggcaagtacgagaagaaggtgtacgttttgcctaagcaccttgatgagaaggtggctgctcttcaccttggaaagcttggggctaacctcaccaagctcaccaaggatcaggctgactacattagcgtccccattgagggtccttacaagcctcctcactacaggtactgaggagagaatacgagagagagagagggagagagttggactagaaaaaggaaccatacaacgggatggtttgattgtttgtttttactaaaatttattgatgatttgtgggtagatggttagattttgattttgataggagtttgcgtgtgggat

SEQ ID NO: 50611 - DNA, 412 bp, Gossypium hirsutum
  Clone ID: LIB3197-025-Q1-M1-E11
cggacgcgtgggcttcccgctgagcgcgctttctcctcggtccacagagacaaaatggaatgtaggactaggactggcgccaacagttaatcacggaagaaaggactcactgagccgggatcactaactaatactaatctaatctaactaatactaatctaatactaatagaatactaatctaatactctaatactaatagaatagaaaaaatagaatagaaaatactaatataatagaaagaactgtcttttctgtatactttccccggttccgttgctaccgcaggctttacgcaatcgatcggatcatatagatatcccttcaacacaacataggtcgtcgaaaggatctcggagactcaccaaagcacgaaagccaggatctttcaaaaaatggattcctattcgaag

SEQ ID NO: 50612 - DNA, 435 bp, Gossypium hirsutum
  Clone ID: LIB3197-025-Q1-M1-E4
gcgaagcgagacaaaaatggcgacttcagccatgtcggaaaaacgggtcgtcctgctctgcggcgactatgccgaggactatgaggttatggtccctttccaggctctgttggcttatggtatatcagtggacgctgtttgtcccggcaagaaggccggcgaaacttgccgcaccgctattcatcaactttccggccatcagacctataccgagatccgtggtcacaatttcacactaaatgcatcatttgaagatatagaccatactaaatatgatggtttagttatagccggaggacgagctcctgaatatcttgctatggatgcatttgtattgaacatggttcgcaattttgttaattctggaaagcctgttgcttcaatttgtcatggtcaattgatattagctgctgccggggcaattggtggtctaaa

SEQ ID NO: 50613 - DNA, 415 bp, Gossypium hirsutum
  Clone ID: LIB3197-025-Q1-M1-E5
ctcgttttgtgaggaaagaatgaaccttgggagtggaaattgctgaaatgggtcattgtgcccaagtcttccacaatagaaacaaaataaagataagcgctcatatttaaaatgttcatacgtcaattttaaatatgagcgcttatctttaaaattgacgtatgaacattttccaccaaaagaaattttcttcctccttttcaaaggacgccttatgtcgatctgtactctaattctactcataaaattcctattcccttttcccaatgaagagacatcatgctccatgaaatttcccaagaaatttcctaacgggacagccagaatatcagaaaagagaccagtaggaatgttataaatctggacccaaaaaggtgtcagaactagagggatctgtaaaggatcttcccccaat

SEQ ID NO: 50614 - DNA, 411 bp, Gossypium hirsutum
  Clone ID: LIB3197-025-Q1-M1-E6
cggacgcgtgggttctgaattgaatctaaagatgggtttttgcttctgggttcgatttatttgtttgataaacttctacagcttgagttttgtaagttcacaagctgatgcaagtgctgaaaggactgttttcattgatggaaaagctcctattggtacaatagatgatgatttcatttgtgctactttggattggtggcctactgagaaatgtgattatgggacatgctatttgcgccttgctgggcttctcaatctggatcttaataaaaacttattcttggatgccgttaaagctttttcaccattgaagattatgttgggcggcacattacaggacaaaggcatatatgacactgatgacaatgaactaccctgcacttcatttgttaaaaacacttctgagatttt

SEQ ID NO: 50615 - DNA, 423 bp, Gossypium hirsutum
  Clone ID: LIB3197-026-Q1-M1-A1
cccacgcgtccgctccactgcagcaggagcagagggaaaaaggataaaagcatcgtcgtgttctcgcttcttcaactctgtctctacgtctctgaacctcctcctttcgttcttttcttattcagtattgtaaaagatggccgatgctgaggatattcaacccctcgtctgtgacaatggaactggaatggtgaaggctggttttgctggtgatgatgctcccagggctgtttttcccagtattgttggtcgaccccgacacactggtgtcatggttgggatgggtcagaaggatgcctatgtaggagatgaagcacaatccaaaagaggtattcttactttgaaatatcccattgagcatgggatcgtcagcaactgggatgatatggaaaagatctggcatcatacattctacaatgagct

SEQ ID NO: 50616 - DNA, 426 bp, Gossypium hirsutum
  Clone ID: LIB3197-026-Q1-M1-A10
cccacgcgtccgatttcaaattgttatctctgaaggtgtcttaataaacgccttcgatttaccttcgatttccatttacttctctattgctacgtttttgaatttttagtgagcgaaaatgagagagtgcatttcagtccacatcggtcaggctggtattcaagtcggaaatgcctgctgggaactttactgccttgaacatggaatccagcctgatggccagatgccaagtgacaagactgtcggaggaggtgatgatgcttttaacacctttttcagtgaaactggtgctggaaagcacgtccctcgtgctgtctttgtggatcttgagcctactgttattgatgaagtgaggactggtacttaccgtcagcttttccaccctgagcaactcatcagcggcaaggaagacgctgccaacaactt

SEQ ID NO: 50617 - DNA, 407 bp, Gossypium hirsutum
  Clone ID: LIB3197-026-Q1-M1-A11
attgctgagtcaggggctaccgagttactgagttcttcatggctgattttcatacatcgactcatagagctaactggatcttctcgcctcaagaactggttgagaaatacaaggctgcaaatcaaagagcaatacaagcactggagaagtatgggacaacacaaatggaagtagacgctgatggttcactatcataccctgaacctattgcaagagataatgctgacaagcattctcgtccaaaacctcttaacattgaagaagaacagttcatgcgagtgttttatgagaacaaacttcgagaagtttgtagtgcattctactttcctaataaaattcaggcaactgctctaatttatttcaaaaggttttacctgcaatggtcggtcatggaacatcatcccaaa

SEQ ID NO: 50618 - DNA, 337 bp, Gossypium hirsutum
  Clone ID: LIB3197-026-Q1-M1-A12
aagaaaaaatggctttgaattttaatcccatcgcctcgaaatctcagaagctcccttgctttgctcttccacgaaaggccaccctcagatctcccaagttttccatgatctccaccattccttctggctccaaagaggttgggaatctgaaaaagcctttcacgcctccaaaggaggtgcctgttcagatcacccactccatgccgcctcacaagattgagatctttaaatctttggagggctgggctgagaacaacattctgactcacctcaaaccagttgagaaatgttggcaacccgccgactttcttccagatcctaattctgacggatttca

SEQ ID NO: 50619 - DNA, 419 bp, Gossypium hirsutum
  Clone ID: LIB3197-026-Q1-M1-A2
cggacgcgtggggcaactctcatccacccatttctctaaatttcctacatttttttctttagaaaatttcagtttctccttctcttcacaaatcaaaatgcgtgagatccttcatattcaaggtggccagtgcggcaaccagatcggagcgaagttctgggaagtggtttgctcagaacacggcatagatcccaccggtcgttaccaaggagacttggatcttcaactcgagagaatcaatgtctactacaatgaagccagttgtggtagattcgttcctcgtgccgtcctcatggatcttgaacccggtaccatggacagcatcagatctggtcccgtcggccagatcttccgacccgataactttgttttcggtcagtccggtgctggtaacaactgggctaaaggccattacactg

SEQ ID NO: 50620 - DNA, 236 bp, Gossypium hirsutum
  Clone ID: LIB3197-026-Q1-M1-A3
gccaaggttcatccctgaaacccaaaatggttatggcctttacggccacgagtcaggctcaggctcaagctcaggctcaagccggcccagtttcaccaccaaagaaacctatgaaccctatgtcacccctgttagattccaccctgatgaaccctataacagcatccccgaatcctccaacaataaagacacttactactacaacaagaatgcctacaagtccactaagcagcaaa

SEQ ID NO: 50621 - DNA, 187 bp, Gossypium hirsutum
  Clone ID: LIB3197-026-Q1-M1-A4
cccacgcgtccgatatcaacatatatgtttaaaaataaaataaaaattattaaaaaataaatatttatcttcataatgaatatgtacaaatgactatccaaattcattttgaatatggttttgaattataaaatattataagaaaattgtaaaataattaaaaagggttaaaagtaaagagatcact

SEQ ID NO: 50622 - DNA, 433 bp, Gossypium hirsutum
  Clone ID: LIB3197-026-Q1-M1-A5
ctgaaggtgtcttaataaacgccttcgatttaccttcgatttccatttacttctctattgctacgtttttgaatttttagtgagcgaaaatgagagagtgcatttcagtccacatcggtcaggctggtattcaagtcggaaatgcctgctgggaactttactgccttgaacatggaatccagcctgatggccagatgccaagtgacaagactgtcggaggaggtgatgatgcttttaacacctttttcagtgaaactggtgctggaaagcacgtccctcgtgctgtctttgtggatcttgagcctactgttattgatgaagtgaggactggtacttaccgtcagcttttccaccctgagcaactcatcagcggcaaggaagacgctgccaacaacttcgctcgtggccactacactattggcaaagagatcgg

SEQ ID NO: 50623 - DNA, 234 bp, Gossypium hirsutum
  Clone ID: LIB3197-026-Q1-M1-A7
atttttcagagtagaagcttcactaagcttactccctccctccttcccgctctctgtttctgtcgcttccatggctgtcttgttaaaaaggccggccgtttggggttccttggggggcctaaggaggcggggttgggctagctaactgagtttcatgagctttttcaacctggttgggcaaacgatcatttcatctatgaaggagagcttcttaagcccaaacttgataacttt

SEQ ID NO: 50624 - DNA, 417 bp, Gossypium hirsutum
  Clone ID: LIB3197-026-Q1-M1-A8
tcggacgccccctcttacttatatcattcaataattttcatcaacaaagaaaaatgagagagtgtatttcgattcacattggtcaggccggaattcaggtcggaaatgcttgttgggaactttactgtctcgagcatggcattcagcctgatggccaaatgcctagtgacaagactgttggtggaagagacgatgctttcaacacctttttcagcgaaaccggtgccggaaaacacgtccctcgagctatatttgttgatctggagcctactgttatcgatgaaatgaggactggaacataccgccaactgttccaccctgagcaactcatcaatggtaaagaagacgctgcaaacaattttgctcgtggccattatacaattggaaaagagattgttgacctctgcttggatcgta

SEQ ID NO: 50625 - DNA, 259 bp, Gossypium hirsutum
  Clone ID: LIB3197-026-Q1-M1-A9
ccgggttggggttggggttttggttggttcctgcaagacatgtgaatgctgcgagcaggatctggagaactactgccctcgtataatatttacctacaactcttacaatccagacgggacaaaaaattatggtggttattcggatatgattgtggttgaccagcgctatgtgctacggtttcctgataacttgccactggatgcgggtgcaccattgttatgtgcaaggatcacagtgtacaaccctatgaagtattat

SEQ ID NO: 50626 - DNA, 432 bp, Gossypium hirsutum
  Clone ID: LIB3197-026-Q1-M1-B1
cttctttcctcctagcccaaaaaaaaaaaaccctctttcctttctctcgttctttttcccgttcaatcatgtcttgcttcattagcaaatatgccgatgagttggctaaaaacgctgcttacattggaacccctggaaagggtatccttgctgctgatgaatccactggcaccatcggcaagcgtctttcaagcattaatgtagagaatgttgaagataacaggcgtgctctccgtgagctcctattcacaactccaggagctcttcagtacctcagtggtgttattctctttgaggaaaccctttatcaaaaaaccgcttcgggcaagcccttcgttgatgttttgaaggaaggtggtgtcctccctggcatcaaggtcgacaagggtaccgttgagcttaacggaaccaatggcgaaactttcacccagg

SEQ ID NO: 50627 - DNA, 393 bp, Gossypium hirsutum
  Clone ID: LIB3197-026-Q1-M1-B10
cggacgcgtgggtttctttccttgttctattatatatatttatcttcatcatcagacatatatacgtgtgttgcgtgaatgctcattacatattttcacaccataggagaggaagatattatatcaagctagaacatctcccttttacatcaactaagtaaagcatgcaaattcccacagagaggaaaacaggcgtctacacatacataggtcaatggccaatttactccgtggcatggtccgtccgcaacgacaaaagatctcgccttgccattggcagtttcctcgaagactacagcaacaaggtggaactggttcagttcaatctctatacatccgatttcacgactgacaatcggttagttttcgatcacccttacgctcccaccaacc

SEQ ID NO: 50628 - DNA, 369 bp, Gossypium hirsutum
  Clone ID: LIB3197-026-Q1-M1-B11
ctttttccttttccaaaaacctccgatacttcctctctccctttcctccgattccatatctctctctctttctgctagggtttgggagttagtgaagaaggggttgttatttcatggggcaacaatcgttgatctacgccttcgtggcacgaggcaccgtggtcttagccgactatacggagttcaccggaaacttcaccggcatagcttctcagtgtctccagaaacttccttcttcaaacaacaagttcacttacaactgcgatggccatacctttaactatctcgtcgataacggcttcacttattgtgtggttgctattgaatccgttggcagacaggttcctatggcatttcttgagagaataa

SEQ ID NO: 50629 - DNA, 393 bp, Gossypium hirsutum
  Clone ID: LIB3197-026-Q1-M1-B12
gttgggggaggaatatatacgaaagcagccgatgttggtgctgatcttgtcggtaaagtcgagcggaatatccccgaagatgatccacgaaatccagctgttattgccgataatgtgggtgataatgtaggagacattgctggaatgggatctgatctatttggatcttatgctgaatcatcatgtgctgctctttttgttgcatccatatcatcctttggtatcagccatgagtttacagcaatgtcttatcccttgctcattagctcaatgggaattgtggtatgtttgataactacactttttgcaactgatctgtttgagatcaagaaaagtagtgacatcgaaccatcattaaaacgacaactgcttatctccaccggtctcatgaat

SEQ ID NO: 50630 - DNA, 403 bp, Gossypium hirsutum
  Clone ID: LIB3197-026-Q1-M1-B2
atttgaagtacactcgacagttccagcttaaagctttgttttcttttgggtgtgtatataaaaccctttcttcaatggcttacgaaggcatcctcttgggcatgggaaacccgcttcttgatatctctgctgttgttgatgaagacttcttaaagaagtatggcatcaagttgaacgatgccattctcgcagaggataagcacttgccgatgtatgaggagatgactaaaaagtatgaagtggagtatattgctggaggtgccactcaaaactctatcagagttgcccagtggatgcttcaaatcccaggcgcaactagctacatgggttgcattggtaaagataagttcggagaagaaatgaagaagaattcaaagcttgctggtgttaatgtgcattacta

SEQ ID NO: 50631 - DNA, 387 bp, Gossypium hirsutum
  Clone ID: LIB3197-026-Q1-M1-B3
gctgagtcaatctcggattgcaacaaaacgcttgctgttgatccaactagcatccaggcccttgacaccagggcatcgcttttggaaaccatccgctgtttacccgactgtttgcacgactttgaacacttgaaactgctttacaattccatcttgcgagacaggaagctcccaggtccagcctggaagcgtcacaatgtgagatacagggagattccagggaaactctgtgcattaaccactaaaattcgacaattgaaacaaaggattgcttctggggagaccggaaacgttgattaccatgccttgattggtttaaggcgtggatgctcaatgtctgaattagagagggctcatttgctactctggttaagacacaaaccagat

SEQ ID NO: 50632 - DNA, 417 bp, Gossypium hirsutum
  Clone ID: LIB3197-026-Q1-M1-B4
attaaccacagaaattcctatagaatatctgtttctttggttgaggttttcagaaggtaactggtaatggggagaccaccttgctgtgacaaagtcggtgtgaagaaaggtccatggactcctgaagaagatatcgtcttggtgtcttatattcaagaacatggtcctgggaattggagagctgttcctaccaatacagggttgctcagatgtagcaagagttgcaggcttagatggactaattacttgaggcccgggattcgaaggggtaactttacagaacatgaagagaagatgataatccaccttcaagctcttttaggcaacagatgggctgcaatagcatcttacttgcctcaaagaacagacaatgacattaaaaactactggaacactcatctgaagaagaagctgaag

SEQ ID NO: 50633 - DNA, 409 bp, Gossypium hirsutum
  unsure (1)..(409): unsure at all n locations; Clone ID: LIB3197-026-Q1-M1-B5
cccacgcgtccgctcactttcacttcaaaaaaattaaaaaggaaaaaaaatcggttgattatctccggtgagttcaagccgggaagtcttaccggcgatctctccggaaaaggtgttttggagggtgaaagaagcttggtttttgattgagtgaagacgagtctgattgtaaggttggcgagaaatgttgcttttcgttgtttcagcatcatcattgtgcacaagcttctacaaggaaacagcaaaatctgtatggttaataactcatttcaatgagtgacactgttttcgtcttgggctcctagtctaatatgggttacacttgcagttgtatcactttgctgccttgttcggattacatgttaagataaaattaaaaagatgtcactgttgaatgncacaggacatg

SEQ ID NO: 50634 - DNA, 188 bp, Gossypium hirsutum
  Clone ID: LIB3197-026-Q1-M1-B6
gcttctcttctccttctcttgcctttccaggttccaaactctcagtcttcctctagctcctatcctttaacaggaaatggcagtcacattcaacgacttgggttctgctgccggcttgaagaagctcgatgagtatctcctcactcgcagttacatctctgggtaccaagcttcaaaggatgatatca

SEQ ID NO: 50635 - DNA, 368 bp, Gossypium hirsutum
  Clone ID: LIB3197-026-Q1-M1-B7
gaaatgcttaaaaatgatgctgttaaactctgccaggataacaatttcaatacaggatttttcgagggtagtgataataacagtgtcgtagatgcttatgaattgaaggttaggcttgagcatattcttgacaggatagcattgatatccgaggccgctaacacagagaaaccatctttaattacgagttgcttgttcattggtggagcactggctgcgagatctgcttacacactgcagcattttggaattactcatatattgtgtttgtgctccaatgaaattggacaggcagattctcaataccatgacctattcaagtacaaaaacttttccatatatgacaatgaagattcaaacatcagcag

SEQ ID NO: 50636 - DNA, 377 bp, Gossypium hirsutum
  Clone ID: LIB3197-026-Q1-M1-B8
cagaaattaaaagaaaaaatatcaattttattttattactaaagcgtgaagattcaagcttgcaatcgaattcctcatttgaaattctttgatgaaacaggtattagaactgtaatagagaggataaaaaaagatcattgttgaggatggcttgtaaaggatgcctagaatgcttgttgaagctgttgaacttcttgatgactcttgttggtttggcaatggttggatatgggatctacttgtttgttgagtacaaaagagctgctgatgttgccatgcttttgtcacctgtgggcactgaccaaatacagctcggtcggcccatgctcatggccgtgtctctttcgtctagtattttcgataatcttccaaaagca

SEQ ID NO: 50637 - DNA, 351 bp, Gossypium hirsutum
  Clone ID: LIB3197-026-Q1-M1-B9
aataataatagcatcttcctgttaattttatctatcttcttcgtcttcatttcaccacatttgttttagcaaagacaagtggttgatggaaaagttagagaagcgtcggcagtaggcttggattcttgtgggaaaaaaatatagctaaaggggacctttatgtttttgtctttacaatattgttgtgtgttataataacaacggaaggttggtggaggttttttgcaggattgaaaatcaatgtcaagttcatctccttttcttctttttcattgccttaacctctagggcactagcttgaaacctttttttttctttttccatttagtttttgggggtgtgtttaatggc

SEQ ID NO: 50638 - DNA, 392 bp, Gossypium hirsutum
  Clone ID: LIB3197-026-Q1-M1-C1
aatttggatacagcagtcagccaaggactacaacaatggtggtgaaggtgtatggcccagcctttgcttctccaaagcgagtgattgcatgtcttattgaaaaggagattgaattcgagactgtccctgttgatttgcttaaaggagagcacaaagaccctgaatttctcaagctccagccttttggaacagttcctgtcactcaagatggagattatgttttatatgaatcccgtgcaatcataagatactatgcagaaaaatacaaatcacaagggactgatctactgggaaagacagtagaggaaaggggtcaagtggaaaattggctagaggttgaggcacacaatttcaacccaccaatttacgccttgaccctacatttgatgttt

SEQ ID NO: 50639 - DNA, 412 bp, Gossypium hirsutum
  Clone ID: LIB3197-026-Q1-M1-C10
gaaaaggtgaaattcggaacattcgatattatatcagacaatgaagttcgggaaggtttaaagaagttctcaaagtggccaacttttcctcaactctattgcaaaggtgaacttcttggtggatgtgatatagcaattgccatgcatgaaagtggtgaacttaaagaagttttcagagatcacggagttgatattattgggactgaacaaggaaccggtggcatcttggaaccgaccggattgactgcaaacctaaattctcggcttcaaagcttgattaattcaagcccggttatgctgtttatgaaggggaagcctggtgaacccaagtgtggttttagccacaaggtagttgaaatccttaaacaagaaaaagttgattttgagagtttcgacattctctcaaatgatg

SEQ ID NO: 50640 - DNA, 423 bp, Gossypium hirsutum
  Clone ID: LIB3197-026-Q1-M1-C12
agggaatctccctcaaaaatcagaaactgccatcccttaccggctcctatttggactgctttccggctggctattgattatgcagcaaatgccgataagatattttcatggatttctgtacatgataagaggattttcccttctgaatctcttaccacaactccggaggccgagcggttctggcttttattgaaggccccaccaaaattgatcttaatgaaccctccatgtggccttttacatcttatttttcccccgagtgcacaacacaagagtctactgtgataaaggttaagcttttccagcacccagcaggacaggcaccaaaaagatgattcattgtttcagctcattcaccgcaacggggacaactttggttaactgataactttcaatgctgaaggttcacctttgtaggaaaat

SEQ ID NO: 50641 - DNA, 369 bp, Gossypium hirsutum
  Clone ID: LIB3197-026-Q1-M1-C2
ctcgaccttccatcccctctccctgctttgctctgaaaagtccaagtttttctccaatggcgaccgtctctccaactcctctgttgaaagatgagctcgacatcgtgattcccacgattaggaacttggactttttggagatgtggagaccctttttccagccttaccatctcatcattgttcaagatggtgatcctaccaagaccatcaaggtccctgaaggcttcgattatgagctttacaataggaacgacatcaacaggattttgggtcctaaggcttcttgtatctctttcaaggattctgcttgtaggtgctttgggtacatggtttccaagaagaaatacatctataccattgatgatgact

SEQ ID NO: 50642 - DNA, 406 bp, Gossypium hirsutum
  Clone ID: LIB3197-026-Q1-M1-C3
caaaaatacaggcaagatatgtcagtgatccatcgtgaaaacaacttaacccaatcaatcctccatttataggagcctcgatctgaattcattttcaagatcaaaaggaaatgatggatgtgagggtgaagcttttaatccttttggcaacctcactcttgatttactcgctcatagttttactcaaagtcctgtatgactactggtgggtgcctctccgtatacaacacttcttgaattcacaaggacttaaagggcctccttacaagttcatccatggatgcaacaaacaaattaacaaaatgagaagtgaagcattaagcaaacctatggggctgacacatgacatacttcccagagttttccctcattattactcctggatcaacttatacggaaagaacta

SEQ ID NO: 50643 - DNA, 428 bp, Gossypium hirsutum
  Clone ID: LIB3197-026-Q1-M1-C4
attcccaagggcctgccatctttgataggaactttggacaagtactctgttatttttaacatgaaaccatttttcccccggagataaatggatctgatgagaaattggcatgagtttaattagcagtcctatgtatagaaactttacatgaagaaaagtctgcatcaccctagtactcatgagtcagttatgagtcccagctcacccctgacatgactaatgccttccttttttcttttatcacgagggtgtgagaacaagaaataaacttcaggctactactgtacagtgaagtgccccgcaagcacgtatgatcttaaaatagcaacaagggcagcagcaccatgacaacaaaagtaataatggcaaagagaagcagaaccctaatgtttttgggttcgccactagatacccttttaatcctgatt

SEQ ID NO: 50644 - DNA, 338 bp, Gossypium hirsutum
  Clone ID: LIB3197-026-Q1-M1-C5
gtttggtcacaccctgaccataaattttgtgtttaggaatctcagttgtgataatctccatgcatcagttcttttcatcatattcaaaggttaaagatgaacaacgcagtggtaattttaaaatggtggaaagcatagacagccagaggtctagggatgcatccttcccaaataagactgatgttagtgaaaatgctagccaccatgttaatgaggaaaaaggaccacttcttccagtttaggtttgcatatattcggtatctatgtgcaatattggcttttcttacaagaaaatttatggagtatacattcttttaggttgactcagactcggagtg

SEQ ID NO: 50645 - DNA, 385 bp, Gossypium hirsutum
  Clone ID: LIB3197-026-Q1-M1-C6
ctctgaaggtgtcttaataaacgccttcgatttaccttcgatttccatttacttctctattgctacgtttttgaatttttagtgagcgaaaatgagagagtgcatttcagtccacatcggtcaggctggtattcaagtcggaaatgcctgctgggaactttactgccttgaacatggaatccagcctgatggccagatgccaagtgacaagactgtcggaggagatgatgatgcttttaacacctttttcagtgaaactggtgctggaaagcacgtccctcgtgctgtctttgtggatcttgagcctactgttattgatgaagtgaggactggtacttaccgtcagcttttccaccctgagcaactcatcagcggcaaggaagac

SEQ ID NO: 50646 - DNA, 253 bp, Gossypium hirsutum
  Clone ID: LIB3197-026-Q1-M1-C7
gaaaaaagagaatataacgcgctttttacttcgctgttgactggaaaactcccatcattacttcgatccgatcattattctgagacgaagatcgaattggatgacgtctactttgcaggacaaggaggtttgctccaatgagcacacatttggattggtgaagggttgctttatgaggaacaaccagttgtgaaatgtctgaagcggagtggcctttgttgaacccaatgaggatgccagagactcagctggg

SEQ ID NO: 50647 - DNA, 341 bp, Gossypium hirsutum
  Clone ID: LIB3197-026-Q1-M1-C8
gttttctctgtttgccattcgcctgaatggtcttcctctttctttaaaacttgttcctatttaattccgaccaaactctcactcgattccatggctactggacgggttgtttcagggataacggcgttccatgaagagaaacctgaataagaggtcaagggggaataaatttcaacaacacaggttttggctgttgctcctgcaccaaaacctgttggtgaagaaccaaagggatccgtgcctgaagcatcattccaaaaaccccaagctccagaaactgaagccacagttgaaactgaatccaaggagggggtcaaagagcccaatgctgtgactgaaga

SEQ ID NO: 50648 - DNA, 327 bp, Gossypium hirsutum
  Clone ID: LIB3197-026-Q1-M1-C9
cccacgcgtccgattaatttgtggtgtgccatcactttgtttatcattcaactggaagaaagatgttagcagtgaaagtgatttgaaaaatgcagccgatttttgtttgcctttaatatcagcggctgtaagagatattgagaggggaaagttcccagaaagttgctttctgaatatagaaatcccatcttctcccctagcaaacaagggattcaaactgaccaggcagagcttatggaggtcacctttaagctggaaagctgtatcagcaaataggcaccctgctgcaggccaatacctgtcgaatcagcaaagtcttggtattaa

SEQ ID NO: 50649 - DNA, 394 bp, Gossypium hirsutum
  Clone ID: LIB3197-026-Q1-M1-D1
aattaacaacgcaaacaaatatttaaaaaaaatggggtttcgataaaaatatgaatatttttagttcattatatgaaaccaatgcaattgcaggcaatcatgattttgatagtgaaatagaaagctagcctttccctttgccattgcgtttgtctctcttgtgttcactgtttcagggataattaaaccctttcaaccacctctcttgtctccgccattaaagcttctgaaagaaaaaaaaagagtcaattttcattcatttaattcctttgtttctctggtacaaaagatccaaggggagataaagtgttgtttgtttttagctattgttttatttttatagtaatgcattgctagcttctccaatttcatcactttcctttggcactgaatg

SEQ ID NO: 50650 - DNA, 376 bp, Gossypium hirsutum
  Clone ID: LIB3197-026-Q1-M1-D10
caaaacccgaaggaaaaaggaaaatccttttttcctctgtccttccctttcaacgcagaccgaaagagaaggcggagtcctcccacaatttcttgtggccaccaatcacgctctactcttaagggaagtcagcatggatcaggctcaacacccaactgtcatgcagaaggtagcagggcagctcactcgttttagcaattcccaagattttcaagggtatgatgggtctttccgtaggcctgctctctaccaaagaaatgttgcatatcaaaattgctccaatgctgcactgcagtaccctattgtccgagcttgtggagttaccagtgacatgcctatggttccatcaacagcatctgctatttgtattcaagct

SEQ ID NO: 50651 - DNA, 397 bp, Gossypium hirsutum
  Clone ID: LIB3197-026-Q1-M1-D11
cgaagaagctgtcaaagcctatggagttcaccttggaacagaaatgtgccgcaagattttagctcatggggttaagacattgcacctttatacattaaacatggagaaatctgcattagctatcctaatgaatcttggattgattgaagagtccaaaatttctaggtccttaccttggagacgccctgcaaatgtttttcgtgttaaagaagatgttcgtccaatattttggtctaaccgtcctaagagttacataaccaggactattggttgggatcagtacccatatgggcgatggggtgattctcgaaatccgtcctatggtgcactaacagaccatcagttcatgaggcctcgagcacgtgacaagaaacttcaagaagaatgggcttcccca

SEQ ID NO: 50652 - DNA, 412 bp, Gossypium hirsutum
  Clone ID: LIB3197-026-Q1-M1-D12
aagactttcagatccatcacaatatcaatcaatagttgatgcagaatggaatatcatttatgacaagttggataaatgtgtgaagagtggtgcaaaagttgttctttcacggttggctattggtgatttggcgacacagtattttgcagatagagatattttctgtgctggtcgtgtagctgaggaagatcttaatcgggttgctgctgcaactggtggaaccatacaaacatctgttaacaatataattgatgaggttctaggaacatgtgaggtttttgaggaaaagcaggttggaaatgaaagatttaatatattcagcggttgcccgtcaggacggacagctactatagttctacgcggtggagcagatcagttcattgaagaagctgagaggagcttacatgatgca

SEQ ID NO: 50653 - DNA, 203 bp, Gossypium hirsutum
  unsure (1)..(203): unsure at all n locations; Clone ID: LIB3197-026-Q1-M1-D2
aagaattcacatgctaatattcgagccaaagctgcagaagtcgtatccaccattgtacaaaataatccccggagtcaacagttggaaaggagaggctntaagccntttgnttncataaccaactgttgacttcccnttttatttaaccttattctttatagcttttactgttcaactgattattaaggagtttaaaaaatcta

SEQ ID NO: 50654 - DNA, 294 bp, Gossypium hirsutum
  Clone ID: LIB3197-026-Q1-M1-D3
gatttttcttggttagcatatgtctcaaaggcctaacgttccccactcttcttcaatagcttttggtctccattctcatctcctggtttccagtgagatgaaccctaattccaactggtcttaatagttccatctctttctttttcttctattgattttttggttaaacttcttttatttcctttttgaaacaaagtaattgccttgttgatttgcaagcaaattttgggtaagttcttaagtatttgagtttagatcttctttgagaatgccgctatgggagtgaagagtttt

SEQ ID NO: 50655 - DNA, 325 bp, Gossypium hirsutum
  Clone ID: LIB3197-026-Q1-M1-D4
aattgatcctttgcttcgtctttcagtctttgccttctagggtttatcacttgttcctaagcttcctttacgccgttttcgtctttacagagtaacgaatgaaactgtatgctattcagagtcactgctagcaaggaaaagaaccgaaataagcagagatggctgctgagctggtcaattttgccacaagtgagaaattggctgagatggactgggcaaagaacattgaaatttgtgagttagttgctcgagatcaaaggcaagctaaagatgttgtaaagcaattaagaaacgattggggagcaaaaacccaaatactcaatta

SEQ ID NO: 50656 - DNA, 363 bp, Gossypium hirsutum
  Clone ID: LIB3197-026-Q1-M1-D5
tgcagtgcatgcggaaaaaatggatcaaaatatgaactcaaccaaggaaggtcttatctcagggtcaggggcgattcaacacaaagcttacgctcgtgttggattgcttggcaacccaagcgatgtttacttcggcaaaaccatctcttttagccttgccaatttctgggcttccgttactttggagccttctcctcatctcatcatcaaccctcaccccattcatgatcttgttcagtttgattcccttgatcacctcgttaatcggttgcaaagtgaaagttattatggaggtgtgcgactgcttatgtcaatttgtaaactctttcataagcattgcaaggataataacataaatctctc

SEQ ID NO: 50657 - DNA, 410 bp, Gossypium hirsutum
  Clone ID: LIB3197-026-Q1-M1-D6
acagatttcagatcctccttccaagctctgcagaaagaaagtgaagaacaacgatggggctgacatttacaaagctctttagccggctttttgccaagaaagagatgcgtattttaatggtgggtcttgatgcagctggtaaaaccaccattttgtacaagctcaagctcggcgaaatcgtcactacaatccccaccattggattcaatgtggagactgtggaatacaagaacatcagcttcactgtttgggatgttggtggtcaggacaagattcgtcctttatggaggcactatttccagaatactcagggtcttatttttgtggtggatagcaatgacagggaccgtgttgttgaggcaagggatgagttgcacaggatgttgaatgaggatgaattgagagatgct

SEQ ID NO: 50658 - DNA, 232 bp, Gossypium hirsutum
  Clone ID: LIB3197-026-Q1-M1-D7
cttcgaattaacaacgcaaaccaatattttaaaaaaatgggggttccattaaaaaattaatttttttaagtcatttttttgaacccaaggcattggcggccattcatgaatttggatagggaaataaaaagctagcctttccctttgccattgagtttgtctctctcgtggtcactgttttaaggattaattaaaccctttcaaccacctatcttgtctccaccattaaagc

SEQ ID NO: 50659 - DNA, 328 bp, Gossypium hirsutum
  unsure (1)..(328): unsure at all n locations; Clone ID: LIB3197-026-Q1-M1-D8
ctacggattcttcttggttagcatatgtctcaaaggcctaacgttccccactcttcttcaatagcttttggtctccattctcatctcctggtttccaagaaaaatacccctaatatgcaacaggacctaatagagacaaatatcccttaggagaaactgtttcagtaaagaagaaagtagattcagcgaccgagaaagttgagaagacgactgatttaaaagaacccaaagttcaaaacgataaacaaagtgtttctgaggtaatgaaagaattgcaggttctgtttgagaaagcttctgagtcntgaaaccaacttttgaaaatgct

SEQ ID NO: 50660 - DNA, 290 bp, Gossypium hirsutum
  Clone ID: LIB3197-026-Q1-M1-D9
cggacgcgtgggaaaaaaaaaaaaaaaaaaaaaaaaaaaaaaaaaaaaaaaaaaaaaaaaaaaaaaaaaaaaaaaaaaaaaaaaaaaaaaaaaaaaaaaaaaaaaaaataaaaaaaaaaaaaaaaaaaaaaaaaaaaaaaaaaaaaaaaaaaatattttataaaaaaaaaaaaataaatttaaaataaaaaaaaatttgagggggcgtttttatttaaaaaaatttttatttcccaattttattcaaattgtttctttttttaatttaacaattattttttatttttgag

SEQ ID NO: 50661 - DNA, 397 bp, Gossypium hirsutum
  Clone ID: LIB3197-026-Q1-M1-E1
gccagccacagcattcgccgcacggcatcagtctcatcaggcggggaagaatgtctcacaggaagtttgaacacccaaggcatggctcccttggatttcttccgaggaagcgagcttctcgtcacagagggaaagtgaaggcatttcctaaggatgacccaagcaaaccttgcaagctcactgcctttttgggctacaaggcaggcatgacacacattgtccgagaggtcgaaaaacctggatctaagcttcacaagaaagagacatgtgaagctgttacgatcgttgaaacccctcctatggtgattggtgggggttgtgggtatgtcaagacaccacgtggtcttcgcagcttgaacaccgtttgggctcagcatctgagcgaggaagtcaaacg

SEQ ID NO: 50662 - DNA, 416 bp, Gossypium hirsutum
  Clone ID: LIB3197-026-Q1-M1-E10
cagtgagtgagtgagagagagaggagtctgctatttgctaaggtgcagtttggagtggttttcataatggaaagaggtgcaaggatgctgttgatctcagtcatggtcctgctggtccttgcttcaaatgctgaagggagaagactcaaagaggaagcttaccaccctcagaacttcctcggagcctttggtactagtggtgggctagttccaacccctggtggaggtgttggccttaatttagggccgtcagtcttttgttcctatcctgggaccggatgtgttcgtgtccagcctactattcctggtagtactggtaccattggcgctggcacaccaccatgatagatgtcctgattcaggcttagagggtgttgaatgagcttcagttatggaggtctaagctgttgtctctt

SEQ ID NO: 50663 - DNA, 408 bp, Gossypium hirsutum
  Clone ID: LIB3197-026-Q1-M1-E11
cagaagaacaactacagcattatagtacctacttacaacgagcgcctcaacattgctctcatcgtctatctcatcttcaaacatctccgggatgttgattttgaaataattgttgtggatgatgggagccctgatggtactcaggaagttgtgaaacaattgcagaaactgtatggtgaagatcgtattctattgagacctagacctaagaagcttggattgggaacagcttacattcacggtttgaagcatgcttctggaaattttgttgtaatcatggatgctgatctgtcacatcatccaaaatatttgccaagcttcatcaagaagcagtctgaaactggtgccagcatagttactggaacacgatatgtcagaggtggtggcgtgcatggatggaatctgatg

SEQ ID NO: 50664 - DNA, 420 bp, Gossypium hirsutum
  Clone ID: LIB3197-026-Q1-M1-E12
gaagtgatcaaataggaaaatatatgctattatagtaaggtaaattagatacaattatacaatgaggaaatgcgcatcattcgttgttttggtggatttatccacatggacatacacatggcatcaatgtgtcaaatttgataaagattttagttttgactgataaaggatgtaagaatgtaacatggttgtgcatatgaagatttaggtcagaaggatgaaatgaaacatttcttaaagattatgaaatgtggatgaaatttctgtttcacagctttgcatgtcaaattcagcagttctcatccatatattacaagcgcttttattacacatatgttgatttgcctcctttatattgaagttatatctttcatggtttaaatttgtattttaaatgttttgatttagattccaaacatg

SEQ ID NO: 50665 - DNA, 428 bp, Gossypium hirsutum
  Clone ID: LIB3197-026-Q1-M1-E2
gtgtcttgcgggtttcacttcacagctagcaaaggatctgcaagatggaaagcatgaatagcttttggcagttaggagatgatctccggggacaatctaaagcctcagaggatcacaaatggttgatggttgcctccaaactggctgaacagacgaggataaagggtgagcgaatgaacaatctcgatctttcaaagggtccagctgaagtaaggacaagggataaatttgggttccatgaagacaacaaattcgagaaccttaacttcaatatgttgaacttggactccaagatcggagatagtgtaagcaaaagtaccttccgaaatggtatttacaacaccgatgctgtttaccagaaaaataacagccacaacattgggaacctgtctgccaacaaatatagcggcaacaaccatagcaacaaa

SEQ ID NO: 50666 - DNA, 420 bp, Gossypium hirsutum
  Clone ID: LIB3197-026-Q1-M1-E3
gcgggatgttggggttgctctgcttgataggtttggtgctccctgtgttcaagggggtcgcttcttcttcgtcttatagacatcccttttgagcatgctacaagatatcatgtatggttgggacatcttaccatgatgctctttacactacatggattgttctatgtaattggatgggcaatgaatggaactcttgtgaaggaattattggagtggaaaagggttggtattgctaatttaccaggagttatcagcctcttaacctgtttgtttatgtgggttacatcgggttatccaatgaggaaagactacttcgagttgatcttctatacccatcaactatatgggagcttcggcaactttttggcattggacgggagggattttggtattagcataattgccggcgcgatatttatt

SEQ ID NO: 50667 - DNA, 412 bp, Gossypium hirsutum
  Clone ID: LIB3197-026-Q1-M1-E4
ggaagggctcacccaacagagagcgatgaggatcccaagatctataggatgaagctctgggccaccaatgaggttcgggccaaatccaagttctggtacttcttgaggaagctgaagaaggttaagaagagcaatggtcaggtccttgccatcaatgagatatttgagaagaaccctaccaagattaagaattatggtatatgggtccgctaccaaagccgtaccggttatcataacatgtacaaggaataccgtgacactactctaaacggagctgttgaacagatgtacactgagatggcttctcgccacagagtccggttcccatgtatccagattatcaagactgcaactatcccagccaagctatgcaagagagatagcaccaagcaattccacaactccaaaatca

SEQ ID NO: 50668 - DNA, 432 bp, Gossypium hirsutum
  unsure (1)..(432): unsure at all n locations; Clone ID: LIB3197-026-Q1-M1-E5
cgactttaactcgtaggaatccagattctgcgcccaaattgaatcgcttgtacgcacgcgagagcttctgctgcaaatgttgttggtatgtgttcatttctgtaaatttttgtttttaaggcttgacctaaagagtttcttataacaatccctatacacgatctattgttctgtttttcaaatgcaacatcaaaattgattttgacattcatctcatttggtggcctccaattctcattagcaattatgttgacaggtatcattctatatacccattcaatttcttgtatatagtctaaaatgaattgggcaactctcgcttctgtttgtgccttattcttatgtattagcaaatttcttgctgaccataagcccaatacagtacatataatgcttttaatctgtctgtttcattnttttgaataaataact

SEQ ID NO: 50669 - DNA, 430 bp, Gossypium hirsutum
  Clone ID: LIB3197-026-Q1-M1-E6
cttatcctctcaatttcacttaaaccctctgcttcactctcccccatcatccctttcttcaatcaattaaaatgtcttcaataaccaaacccatatccatggcggactcatgttgcctcgtttgtatcccttcactattcaccacttgttccaaatccccatctatcctctcctttcccccaaaacgcatcaatcttttgctctcatcttcccattcttcaacctctttgaccctcaaaaccaaaacccatttctcttctctagtttcctttgttgcccaaacatcagattgggctcaacaagaggaagaaaatgacgccaccatcaccatcgatgacgaggaaagtggcattgaagcgaaatgggaaaacgatgaaagtgatggacctgaaggcgaggattctgtttttgaagagcaaagtggggattc

SEQ ID NO: 50670 - DNA, 362 bp, Gossypium hirsutum
  Clone ID: LIB3197-026-Q1-M1-E7
gtcttttctcgtcttccacagttgcatttgagacaattagacagacacaaaggaaacagagaacgaaactatggcttccatgtctttctctgcaactattccgtctcctattcttgatttttcccaaaccaaaaagaacccaggtttttcttcatcatggccttacatgtgtttctcaattccttgcatcaaatcctagcttgggtcttcaaaatcaggctttttccaaaatgggctctccttgccatcgattactgcttctgggtttgtctttaactctagatcttcaggcatttatgcaagagcagctacggataaaaccctatacgactacacagtaaaggatattgatgggaaagata

SEQ ID NO: 50671 - DNA, 293 bp, Gossypium hirsutum
  Clone ID: LIB3197-026-Q1-M1-E8
cttcattttcttccctctgaaaccctaaacgcgccgccgccgccggcggccgtgaaacgccgacgaaaatggctttcgagggattagttctccgcggcaccatgcgagcccacactgacatggtcacagccatcgccactcccatcgacaactccgatatgatcgtcacttcctctcgcgacaagtccatcatcctttggcacttgaccaaagacgaaaagacctacggtgtcgctcgccgccgtctcaccggccattcgcactttgttcaagacgttggtctctcttctgac

SEQ ID NO: 50672 - DNA, 408 bp, Gossypium hirsutum
  Clone ID: LIB3197-026-Q1-M1-E9
cttttgctttcttctctttcttcgccataggttcctctgtggagaacccatccccctcctttagggtttagcagttaaaaagagaaaaacaaaagtatggcgaccgccactgtccccgccgccgcaaggcagctttctcctaaagaagccgacatccaaatgatgttggccgccgaagtccatctcggtaccaaaaactgtgacttccaaatggagcgttacgtcttcaagcgtcgcaatgacggaatctacatcatcaaccttggcaagacctgggagaaacttcaacttgctgctcgtgttattgttgctattgagaaccctcaggacatcattgtccaatctgcaaggccctatggtcagagagctgtactgaagtttgcacaggacactggttgtcatgcaatt

SEQ ID NO: 50673 - DNA, 366 bp, Gossypium hirsutum
  Clone ID: LIB3197-026-Q1-M1-F1
cggacgcgtgggtttctctttcttctccttttcttccctttctttttttgcttgtgggtttatcaggatttttactttcaactgataatttataacccacatttcacattttcctccaattagactgcattttcttgtcaattttagaaagttaaaaggaaacttgatttttgtgtcctctgataactttgaatatatggggaagttaatgagactcatttcaatggctcctctgtttctgctactttgccttccttttgcatttggtgggcatgattataaccaagctttgagtaagagtattctcttctttgaagctcaaagaactggttacctccctcataaccagagagtcacatggagagc

SEQ ID NO: 50674 - DNA, 428 bp, Gossypium hirsutum
  Clone ID: LIB3197-026-Q1-M1-F10
tccatttttaagccccctcttcttgcttccccctcttcattcttctccctttcttacaactttcgttcttcctctcttacttacccatggcccaggagactcttgactctgaatctgcacctgctgcccccgcccaggaggtgtctgtggttgtcgagaagcctcaagttactgagaaagagccacaaccctccgcacctgctcccctgccggaacctgaggtgcccgagaagccggctgttgttgctgttgaagaagaagctgttgaagttgagaagcccaaggttgaagaaaaggaagaaactaagataacccagtctgtttctttcaaagaggaaactaatatcgctggtgaacttcctgagcctcaaaagaaggcccttgatgagcttaagcagcttattcaagaagcccttaacaaccacgag

SEQ ID NO: 50675 - DNA, 417 bp, Gossypium hirsutum
  Clone ID: LIB3197-026-Q1-M1-F11
cccacgcgtccgcccgtttcgattgccaaaaaattgaaattagcttcttctcttttaaatgtatagcttttttattttgttcttcttgatttgattcataaacggtgacttgggagaaagggtggaagcaggttagggtttttgggattgttgagaaggagattagcagcgtggtttccaggtgatgggcgatgagaaatcgatgatcgtgatggcgagtagggatagagagagtagagatcgggagcttctgatcccggtcgctgacgccgtccacgatgattcctccaaaccttctccttcctcttcttcccatcacgccggccgcgagaccttttacaaagttttccggagctgggcttcaaagaagttcatgacgggatgtgtcattttgtttcctatagcaatcactttcta

SEQ ID NO: 50676 - DNA, 175 bp, Gossypium hirsutum
  Clone ID: LIB3197-026-Q1-M1-F12
gagagttgtttaggtttgtcttcaaaaattaaaaagatgtaatgtattgacattaagatttgtcttgtactctctatctgactcgaaatcttgtgtggttctgattggttggtttagctgtcattgttgccaaacggctaatttattacaattatacaaagcattcttatttccg

SEQ ID NO: 50677 - DNA, 426 bp, Gossypium hirsutum
  Clone ID: LIB3197-026-Q1-M1-F2
caagatcctattatccgttatggtggtatgtatgcattagcattggcctataggggaactgcaaacaataaggctattcgtcagctgctgcactttgctgtatcagatgtgagtgatgatgttaggagaactgctgttttagcactggggtttgtcctttactcagagccagagcagactcctcgaattgtctccttactgtctgagtcttacaaccctcatgttcgatatggtgcggcacttgcagtgggtatttcatgtgctggcactggattgagtgaggccatatcattgttagaacccttgacatcagatgttgttgattttgttcgccaaggtgctcttattgcgatggctatggtcatgattcagatcaatgaagcaagtgattctcgtgtcgggacattcaggcgtcaacttgaaaaa

SEQ ID NO: 50678 - DNA, 340 bp, Gossypium hirsutum
  Clone ID: LIB3197-026-Q1-M1-F3
aaaccctgcattttcaaccaaaaaattcaaaaaaaaaattctaaataagtgatggggtttccggcaaatggctcatcggacaaaccattgaagttcctgatctacggtcgaaccggttggatcggtggtttgttaggcaaactctgcgaatcccagggaatcgattacgagtacggctccggccgtttggagaaccggatttcacttgagtccgacatagccaacgtgaaaccgacccatgtattcaatgccgccggtgtcaccggtcgtccgaacgtcgattggtgcgaatcccataaggtcgagaccatcagaaccaatgtggtcgggacccttaccc

SEQ ID NO: 50679 - DNA, 359 bp, Gossypium hirsutum
  Clone ID: LIB3197-026-Q1-M1-F4
ctcactagtatcatgcccctctagattgtcattgaagaaaaaagacagaaatgatatcatgctcaccttagggaaaattgttcatatattttccaagtttcaactattattctagctgtaataaaacacttgatgtttcttttatttcattagaagcaaacaagaacaaatgcctgaaaagtatattatagcaaagacactatggcttttatgtgttatctacattggaagtattgttctcttcgagtccttcgaggctttggttcgaaccaaggatcatttttcgcaacataaatattaagtactggctgagctaagtttgtaatttactgttaagaaaaatggatgttgctatgatt

SEQ ID NO: 50680 - DNA, 363 bp, Gossypium hirsutum
  Clone ID: LIB3197-026-Q1-M1-F6
cataataaccccagtcgaagtttaacactgtgtggggcgtctatcgagattcctttataatcttcaaactcttagttacgcttatagaaatactgtgggaaaataatgtatgatcacaaagacaatcactatgaatcgttgatggagaagatatcatataagaacacatgccatgatatatcttactccttctcggattcctatgtcgactagccatttaaatcctccatgaaagccaaagtctttcatctgttatgaatataaaggcccggtcactacggtacaggagaacgcaaacaagataatattttcctggggaggaacaaaaagattactgctagaacactacgtggcgtaactgtg

SEQ ID NO: 50681 - DNA, 313 bp, Gossypium hirsutum
  Clone ID: LIB3197-026-Q1-M1-F7
agcactggctgctggtgctgacgttagtatgattggtcaatttggtgttggtttctactcagcatacttggttgctgagaaggttattgtaaccacaaagcataatgatgatgaacaatatgtgtgggagtcccaagctggtggttcattcactgttaccagggatacttccggggagaaccttggtaggggtacaaagataactctgtttttgaaagaggatcagcttgagtaccttgaggagcgacgtttgaaggatttgattaacaagcattctgaatttattagctacccgacttccctttggattgag

SEQ ID NO: 50682 - DNA, 412 bp, Gossypium hirsutum
  Clone ID: LIB3197-026-Q1-M1-F8
ctttgctttctttgtattagcagcttgtgtagggggaaaaaattatgaagagggtttcctttgttgccttgtgtgtggtggcactcgcggtggtgctgttttcgggtgaaagtcgcacggcggaggcagtgacatgtaatcccgtggagcttgccccctgctcgccggcgcttacgtcgtcctcgcctccatcaagcgcttgttgcagcaagctgaaggcgcagcagccatgcctctgtggatacattaagaacccatctcttaaacagtatgtcaacagtcctaacgctaaaaaggttgcttcgacttgtggagtcccatatcctaagtgttaaatgttgcttaatggtgtatctactatctactggcagcaaataagtgattctttttgctgtcaagtactgttctgaat

SEQ ID NO: 50683 - DNA, 420 bp, Gossypium hirsutum
  Clone ID: LIB3197-026-Q1-M1-F9
atcagtgcagacttctcaccattttgcccattttcagcagcaactttttccttttggcagttaagtgaaacgatgccatactactcgaggggtggcgaagatgacgttgacgagttcgacgaattcgatccgacgccttacggtggtggatacaatctcgaactaacttatggtcgtcctttggaaccctccgatgagacttgctacccttccgctacaccctccgatggcgactttgattacgcacgtcccgatttctcttccggttacgcgcacttagcttatgccgacgaagccctcgaaactgaatacagtagctatcttaaacccaagccccgacctggacgattcgaacctgcacctgcttttggtgactatggaaggaaacctgaatatgagcaattcgaatctggtcatgga

SEQ ID NO: 50684 - DNA, 377 bp, Gossypium hirsutum
  Clone ID: LIB3197-026-Q1-M1-G1
gcctcttttattcctacccatacacctttgcgacggggcggttctcactatggcttatgggaaactacaacatccctatcaaagcactcgaaaagatccggccgttggtttccagaattgcttttccaaaccataatattgaactcgctcgtgataacgatcctttcatcaccactgaatacatgacgtacatgtttaagtacgacagtgttcacgcgcaatggaagcatcatgagcttaaggtgaaggactcaaagacccttctctttggtgaaaagcctgtcacagttttcggtatcagaaaccctaaggaaatcccatggcctgaggctggaacctaaatttttgttgagcttactgtgttttactgacaagga

SEQ ID NO: 50685 - DNA, 416 bp, Gossypium hirsutum
  Clone ID: LIB3197-026-Q1-M1-G10
caaaaataatactcaatagtaaagtctctcaaaaagaattaggtttttgttggtagattgaaaggaaataggaggaaggcgtaaaccggagattccgactgcggatgaagatttgattcaagtttcagctgaacctcagtcttagcctcaggcaggaatttatacgaaaaatctcttcagcgaaagaaagaaagaaagagaaagaaaatggaccctggtcgctaccctgttcaacaaggacatggatgggataataacagcgctcttgagggttttcctgctgctcttgaccacaattaccgggtcggtggttcatatgatgagaggagatatctagatgaaagatactcgagggataatgtgtatccaagaagtaactaccacagagattttctggagagggataaccaaccccc

SEQ ID NO: 50686 - DNA, 368 bp, Gossypium hirsutum
  Clone ID: LIB3197-026-Q1-M1-G11
gtttaccctgtcctgttttttaatcccattttctggggttttctgaaggtctacagaagggaaagataagtattttgattttttgtctgtctttggccttttgggttttgttttgcgtatttggaaaagatgatgctgcattatcttcagcccgctaagctccaatccaagaagattgtttttgaggatgtgttctctgcgcgtgatcctgccacacttgaacatctcaaggagttgagctctaggcgcagtgtaattgaggagtccattaatcagagtagcttcattactgaggctattgcaagagaaatgtctggaggcttaacttctcattgtctaagggaccttcagaagctggagcaatacct

SEQ ID NO: 50687 - DNA, 350 bp, Gossypium hirsutum
  unsure (1)..(350): unsure at all n locations; Clone ID: LIB3197-026-Q1-M1-G12
cggacgcgtgggcggacgcgtgggataaaatgaagaaaagggaacagaaacgaagaagaaagcacaaaaaggaaagaaaccagaaaaagtaaaaaaaaaaaaataacaaaaaaaaaacagaagaacgggtaagaaaaaaaactgaaagagctacgaagaagaaaaaaagtaaaaaagaaatcaaaagaaagacaaaaaaaaaaaaaatgaaaaaaaaaggggcaaagcaaaagaaaaaaagaaaggaaagagaagcaagcattaaaaaaaataagaaaatataaaaaaaagaaagaagaggaaaacaatccgnagaaaaaaagaataaaagataaaaataatccttgtat

SEQ ID NO: 50688 - DNA, 350 bp, Gossypium hirsutum
  Clone ID: LIB3197-026-Q1-M1-G2
gtcaatggagaagatttggcaagtggggacaggctaatgttccttccatgtggtctaaaagcaggttcttcaattacagtcgttggcactcctcgatatgctcatcaggagtacgtaccccagcttgcaaaaacgaggggtggtaatggcctagtgatggtttcacagtttatggttgagttgcaaggattgcagtctgtggatggggaagctccaccaaagattttacatttgaatcctcgattgaaaggagattggagccgcaagccagtcattgagcataatacatgttatagaatgcattggggtacggctcaaagatgtgatggtttgccatccaaagacgatga

SEQ ID NO: 50689 - DNA, 299 bp, Gossypium hirsutum
  Clone ID: LIB3197-026-Q1-M1-G3
cggacgcgtgggttgcactgctctttctttctttagaattactcactcctgttctagatgaaggttctctccccaattcttgcttgcctagcgcttgctgtggtggtaagccatgctgttctctcacctgagcaatattggagctataagctgccaaatattccaatgccaaaggctgtcaaagaaattctacatccagaactgatggaggagaaaagtacctctgtaaatgtaggaaggtggtggtgtaacgtcaatacaggaaaagggaagcctgggggtgaccccccatgtgaacg

SEQ ID NO: 50690 - DNA, 326 bp, Gossypium hirsutum
  Clone ID: LIB3197-026-Q1-M1-G7
taatttcttccgttgatctttgttagagattagctttttaatttttcattatgggaaagatcaagatcggaatcaatggatttggaaggatcgggcgtttggttgcgagagttgctctccaaagcgatgatattgagctcgttgctgttaacgatcctttcatcaccactgaatacatgacgtacatgtttaagtacgacagtgttcacggtcaatggaagcatcatgagcttaaggtgaaggactcaaagacccttctctttggtgaaaagcctgtcacagttttcggtatcagaaaccctgaggaaatcccatgggctgaggct

SEQ ID NO: 50691 - DNA, 364 bp, Gossypium hirsutum
  Clone ID: LIB3197-026-Q1-M1-G8
ggcaacactgataacaggcagccttccaaagaggttcttgagctgtggagaagtgctgatgcagtgtgctttgatgtggatagcacggtgtgcgtagatgagggcattgatgaacttgcagaattttgtggggctggaaaggctgttgcagaatggactgctagagccatgggtggttctgttccttttgaggaggccttatctgcccgattgtctttattcaagccttcccttacttcaagtccaggattttctcgacaaaaggcccccaaggatttcgcctggcattgaagaattagtcaagaagctgatggcaaggaataccgatgtttatctaatttccgggggcttccgccaaatgatc

SEQ ID NO: 50692 - DNA, 170 bp, Gossypium hirsutum
  Clone ID: LIB3197-026-Q1-M1-G9
ccacggcgtacgcccactcatatcttgtactcctgcgcccatgaagcacattcaacatggcctctacttcaagacttgaaaggaaatgtctacaaagctaacctacccgagacacgccgagcgctacgaacagatgggtatgctcatacaaaccgtcgggccctccgaag

SEQ ID NO: 50693 - DNA, 420 bp, Gossypium hirsutum
  Clone ID: LIB3197-026-Q1-M1-H10
ggagaatgcaggtccagagactgtgtctaaggttttgttggcttttcctgaccttcaagcccaaaacttggcatatttgatggcttccccgcatgaagccaaagcgaaattcaaagtctctgttgtttctttccctattgatgtcgtcaaaccagaagatatgcctcctggtgtaacattctattcggtatcattgccacagggattaaccgtgggcgctagcttcacttttgatgtcttggctgtatttacccatgccttgcgacctatgcccgagcaaatcggtcaggctgatattcagcttgtactgtaccaggatagtgcatactatctgtctccttatgttgtcaaggtccagtctctaagtcttaagctgcctgattctagaattgaatcctatacaacactggagagcacaaa

SEQ ID NO: 50694 - DNA, 426 bp, Gossypium hirsutum
  Clone ID: LIB3197-026-Q1-M1-H11
ctttccctgtatcagcgtttgaggttgaaggtgaagttaagggtgctgttaaggacaagaaagaagaaaaggataatgtgaagcctgctgctgtggaagcagtgaaagaggtctagagtagtgagactagaattaaatttccaaattccatccatctgcggggttgtttttggacttgctatcttttaacaagcctcttctattaatatcatcaatagcagcaatcaataaaaaataacagcatgttagtttacattcagaacactaatgttgcatcgcattgcaagtcaaattgcatggaccatattatatttcaggtacgaccttgcctgaggctgagatacctatacttgtatgtcgcaaaaactagtaatgtgtttcctctttatgacttaaatcaaagagaataaataattgactactact

SEQ ID NO: 50695 - DNA, 421 bp, Gossypium hirsutum
  Clone ID: LIB3197-026-Q1-M1-H12
acgccccactcttgcctctgcgaatcaatttacattcataggtgatatttgtgatggcgggagggaagatgaagaaagataagcaaaaagggccgagagccccctccaatcactaccaaggtggtgtcactttccacaaatccaaaggccagcacatccttaagaaccctttgttggtcgacgctattgtccaaaaggccggcatcaaacccaccgataccatcctcgaaatcggtcccggtactggtaaccttaccaagaagcttcttgaagccggcaaaatggtcatcgccgtcgaactcgatcctcgtatggtcctcgaacttcaacgccgctttcaaggcacccgtttctctagtcgcttaaaggttattcaaggtgatgttctgaagacggatttgccctattttgatatatgtgt

SEQ ID NO: 50696 - DNA, 428 bp, Gossypium hirsutum
  Clone ID: LIB3197-026-Q1-M1-H3
gtcattacacggaaggggccgagttgatcgactcagtgctagatgtggtgaggaaagaagccgaaaactgtgactgcttgcaaggatttcaagtatgccattcattgggaggaggaactggatcgggcatgggaacacttttgatttccaagatccgagaagaatacccagaccgaatgatgctcactttctctgtgttcccttcccctaaagtgtctgacactgttgtcgaaccttacaatgctactctctctgttcaccagcttgttgagaatgctgatgaatgtatggttttggacaatgaagctttatatgatatttgcttccgtactctgaagctcactactccaagctttggagacttgaaccacttgatttctgccaccatgagtggtgtgacatgctgccttcggttaccttgtcaatta

SEQ ID NO: 50697 - DNA, 406 bp, Gossypium hirsutum
  Clone ID: LIB3197-026-Q1-M1-H4
gagcacgcctcccattaactcaattgggtgcacaacagaacgcgatatactgtcatctccctctttctgtcttttctgagtttctcctttttatgatcctctgttttttcattacctcaatggcctaccgctaaaattcgtggtctcccccatcatatcgaacccgaattcagtgatccaacacaatccaatcatcaactctcgaggttcagcacccaattttagtaacaaagaggcacacctcgtagccctcgcacttttcccatcttcaacttatcctcaacattcttccattttcctctgcggaattgagtcaacggttgaattgcaaaaaaaaggtttactgattgggtatttgcgaatctgggtttcttccgaatttccaaaattttgataagattgagca

SEQ ID NO: 50698 - DNA, 437 bp, Gossypium hirsutum
  Clone ID: LIB3197-026-Q1-M1-H5
ccacgcgtacgcgaagatgaagttgacgatggaaagaaaaaagtcagggtcttcttcggtactcaaaccggcaccgccagaagacttggacaaggtgtagcctgctaggcaaaaacccgctatgatgcgcgactttaaagctagaattaaaatgcaaatgccatccatgatgatgaatacgaggagaagatgaagaaagaaagtttggcctttttcttcttggccacatatggagatggtgagccgactgataatgcagattgaccctttcaatgggacacttacgcaaacgaacggggagaacggcttcaaaacatgaaatatggacgttttggccttggtaacagacagtatgaacattttaacaaggttgcgaaagttgttgatgaaatccttactgagcagggagcaaaacgcctagttcctgtgggtcttgg

SEQ ID NO: 50699 - DNA, 135 bp, Gossypium hirsutum
  Clone ID: LIB3197-026-Q1-M1-H6
tttttcgccacgccctccgcatatgaacgactgttgatattatatcggtcatggtgacgggacgagagcaactagtttacttggctaggcttcctgagctaaccaaaaactacgattagatattttctgccatca

SEQ ID NO: 50700 - DNA, 170 bp, Gossypium hirsutum
  Clone ID: LIB3197-026-Q1-M1-H8
gtgtatttcgattcacattgttcaggccggaattcaagtaggaaatgcttggtgacaactttactgtctcgagcatggaattcagtctgatggccaaatgcctagagacaagactgttggtggaggagacgaatctttcaacagctttattagcgaaaccggtgccggaa

SEQ ID NO: 50701 - DNA, 187 bp, Gossypium hirsutum
  unsure (1)..(187): unsure at all n locations; Clone ID: LIB3197-027-Q1-M1-A1
agcaatttgaatcggtgtcgtacggaaaatgttcaggaaccagtacgataccgacgtcactacatggagcccagctgggcgattgtttcaagtggagtacgcgatggaggccgtgaagcanggttcggcggcgatcggtctccgatccaagacccatgtggtgttgggttgcgtcaacaaagctaat

SEQ ID NO: 50702 - DNA, 401 bp, Gossypium hirsutum
  Clone ID: LIB3197-027-Q1-M1-A10
cgcaagccccaactcttttttatttcttgtttcatataatttcgttgctgatctaaaatggcgggtcggggcaaaactctcggatccggagcctcgaagaaggcgacatcgaggagtagcaaagctgggcttcaatttccggtgggtcgtatagctcggttccttaaggctgggaaatatgctgaacgagtcggcgccggagctccggtttaccttgccgctgttcttgaatatcttgccgctgaggttcttgagcttgccggaaatgcagcgagagacaacaagaaaacccgaattgtgccacgccatattcagctagccgtaaggaacgatgaagagctaagcaaattacttggagatgtcacgattgccaacggtggtgtgatgcccaacattcacaa

SEQ ID NO: 50703 - DNA, 438 bp, Gossypium hirsutum
  Clone ID: LIB3197-027-Q1-M1-A11
cggacgcgtgggtcattttcccctttcctcgatcaaaatcctcagctctcttaccgccaaaggaggatcatcttttcaggttttacgatggcatcgaagcggatcttgaaggaattgaaggatttacagaaggatcctcctacatcttgcagcgctggtcctgttgctgaagacatgttccattggcaggcaacaatcatgggtccaccagacagtccttatgctgggggtgttttcctggtgaccatccattttcctccagattatcccttcaagcctcccaaggtggcatttagaacgaaagtattccaccctaatattaacagcaatgggagcatttgcttagacatcttaaaggaacagtggagtcctgcgctaacgatatccaaggtactgttatcaatctgttctttactgacggacccaaaccctgatgat

SEQ ID NO: 50704 - DNA, 331 bp, Gossypium hirsutum
  Clone ID: LIB3197-027-Q1-M1-A12
gtagatttctctcaatttcttcacatttcttgattttatacataaacatcccatctccatcacattctcaagcctattcaatggagtttttaatgaaaatatgtctccttttcctttgtggcctcatttctcactttgttaacatgtttttccagaagagaaatcagcaatgctatatgttgggttatgaatgtttcaaggctgccgatgacaggaagctcgacactgatgcgtgcgtgaaagttgtgttgaggaacaagaatcttggtctggaccaatacaggtttcttttaaaaaccattgttagttctggtcttggtgaagaaactta

SEQ ID NO: 50705 - DNA, 241 bp, Gossypium hirsutum
  Clone ID: LIB3197-027-Q1-M1-A2
cccacgcgtccggttttttttgagagtcaatcctattcaaaaaatcaaaatcccttcgtccatggatctttggatcttttaaaaactttttttcttggtggggggtctttgggttggccttcgtatgggcgttggttttaaaacccaaggccaaggagccttctttggttgaccatttgaacctcgccttgaatttttattcgcaggcattcgaattaaaccttaaaagggccgactttta

SEQ ID NO: 50706 - DNA, 270 bp, Gossypium hirsutum
  Clone ID: LIB3197-027-Q1-M1-A4
caaaggcatgcctctcgaagtcattacggagttcttttccgttggtgcgaagcaagttgcagctgccaagaacaactgagtttggttacatatatttgatggatagtttgaaagttttgacggctgttcaaatttatctttttttttccttttcattttattgtcaattaggcagttcgatttatgtagaaagattaaaaaaaagaacaaaaaaccaaacatgattttctatttgttacagttttctaaatgacatttaaagttttcttc

SEQ ID NO: 50707 - DNA, 454 bp, Gossypium hirsutum
  unsure (1)..(454): unsure at all n locations; Clone ID: LIB3197-027-Q1-M1-A5
tttcattctttgctgttgaagtagtaatatctatagcatacagagatggagaggcaaagaagcaagcaggtttgtttgttgatgtgggttttggttgctgcctttttctcccacaatagggtcattgcagtgacctccactggccttggtgagcagaaaaactactatccagctcctgaccctcatgctggaactcccccttcaggttcacatggcacaccaccatcttcaggaggtggatcacctccctctcatggaaccccgtcacatggaggtggttaccacccttcaccaacaccatcaacgccttcgggtggaaattgtggaactcccccacatgacccttcaactccatcaacaccatcacacactcctcctcatggtactccaccatcatctggaggtggtagtcccncatcgtatggaggaggcagtcccccatcgtatggaggag

SEQ ID NO: 50708 - DNA, 458 bp, Gossypium hirsutum
  Clone ID: LIB3197-027-Q1-M1-A6
gaaagtctcagtgtttttcaagggttttgagagttctcaaatcatacatttacatcctcctccactccctcgatatgatcctctaaaagaaaaaaacaaaatccaaacctaacccagaacttgcagcaaatcaattatggcgaccatgcccgcatccgcatcagatctgttgaagtccttcaaactcaaaaccaagcaacaagaactcttgatccgagtctccatcctctgtctcgtctacatcttggcattcatcactcgtctcttctctgtcctccgttatgaatccatgaaccatgaatttgacccctacttcaattatcgcaccactctttacctcacggagaacggcttctacgatttctggaattggtctgactatgaaagctggtaccctttaggccgaatcgtcggcggcaccctttaccccggtctcatggtgaccgccgttctcattt

SEQ ID NO: 50709 - DNA, 443 bp, Gossypium hirsutum
  Clone ID: LIB3197-027-Q1-M1-A7
cagatatttagtatacagttcactcattatcctttgccttcatagttccattccattttccctaacaaatttatttagatctgatcagatttaactcagatccttttgtatcgagtcttctaaattccagatctttacttattttgaccttaggaagaaagaaaaagaagagatgagagagattattagcgtccacattggtcaagctgggattcaagtcgggaattcttgctgggagctctactgtcttgaacatgaaatccatcctgatggaaccatgcccagtgacacctcagtcggtgtagcacacgatgctttcaacactttcttcagcgaaacgggttcaggaaagcatgtaccgagagctgtctttgttgatctggaacccactgttatcgatgaagtgcggactggcccttatcgccacttttccaccctgagca

SEQ ID NO: 50710 - DNA, 438 bp, Gossypium hirsutum
  Clone ID: LIB3197-027-Q1-M1-A8
cccacgcgtccgcagaagaacaaaaaaattcaacggccgaccgttggtggcgtacggagacgcttctcatctcatttcagcagatctcaactcttccttcgccgggtttatttgttcttccttcgttttttggctgttttcgataaattttttccatttttccatggctgctccacctgcaagagctcgagccgattacgactatctcataaagctccttttgatcggcgacagcggtgtgggtaagagttgcctccttttgcgtttttcggatggctcatttactacaagttttatcacaaccattggaatcgactttaagattaggactatagagcttgatggaaaaaggatcaaactgcaaatttgggatactgctgggcaagagcggtttcggactattacaacagcttactaccgtggagccatgggcatttt

SEQ ID NO: 50711 - DNA, 360 bp, Gossypium hirsutum
  Clone ID: LIB3197-027-Q1-M1-A9
ccggagacgtcggcggaggcctcggggggagttatcttttctgtttaacggcctgcccaccctggaaacggcttatccggaggtagggtccatcggtcggaagagcaccgtacgtctcgttgtgtccggtgcgcccccggcggcccttgaaaatcctgaggaccgagtgccgtccgtgcccggtcgtactcataaccgcatcaggtctctaaggttaacagcctttggtcaatggaacaatgtatgcaagggaagtcggtaaaatgtattcgtaacctctgtaaaaggattggtttttaaggctgttcacggtggtcctaaacattaacccgttcgctgtcggtgcactgatcgagctgc

SEQ ID NO: 50712 - DNA, 365 bp, Gossypium hirsutum
  unsure (1)..(365): unsure at all n locations; Clone ID: LIB3197-027-Q1-M1-B1
cggacgcgtgggttcgacgatcaaatcaaacagtcatggctggagttgcacctgatggatcacaatatgatgctcgtcaatacgacagtaaaatgaatgaattgattgctgatgatggaaatgacttctttactacttacgatgaggtctacgagagctttgataaaatgggtttgcaagaaaacctcttaagaggcatctatgcttatgggtttgagaagccgtcagcaattcaacaaaagggaatcgtgcccttttgtaaaggtttagatgtaatccaacaagcacaatcaggtaccggtaaaacggcgactttctgttcntggatcttacaacagctggattatgggtagtacaatgtcaag

SEQ ID NO: 50713 - DNA, 433 bp, Gossypium hirsutum
  Clone ID: LIB3197-027-Q1-M1-B10
gtcggtcttctggatttattactaaactattgggattttggttctctacccaaattcagacaagcaaccggaaaaaagtgtcagttgtttcagttttcagacaaggaaacaaagcaggaaaatcgggtcagaaaaaaaaatgagagttaactggaaatcatggtcacttaacaaggaccatcttgtgaagcttgcaattggcattctcttagtgggttttgcttttaagctcttggattttcgttctaaaggatttggtgttgatttggaatttcctgaggtagagaaagagtatgttcaaaaaccagatttgaaatcttctctccctgttcaaatacctgaaaatgatgatcaaatgcctctaaatgttgttatagagaaatgggatctctttacaggggattgggttcccaatccctcatgtccgacctat

SEQ ID NO: 50714 - DNA, 415 bp, Gossypium hirsutum
  Clone ID: LIB3197-027-Q1-M1-B12
ggaaaatctactatggcagattggacccaactccccaaggaactactagaacttatctccaaacgcctaggaacccactatgacgtcatccgtttccgttccgtttgctccacctggcgctccgccgttactgcccccaaccgctgccgcaaccgcttcgctccccgtttcccgcttctccctatttcctcccaattctccctctcaaagcgctccgtattcctcctcggatcacccacaactagtacccaaacaaacgcttggagcccctcctcgtgggtaatcaaaatcgaagaagatccgatgaacggcagagtccagcttttgaaccctctctcaaggtctcgtttcgattctctccctgataatttccccaaacctttaaatttgttggattttagggttcttgaattgg

SEQ ID NO: 50715 - DNA, 221 bp, Gossypium hirsutum
  Clone ID: LIB3197-027-Q1-M1-B2
acatcgcctgtgttagactatcaaatgaaagagtgatgggcgtaatcgcacatgggggatcacaatatgaggctcgcatatacaacagctaaatgaacgactcgaatgctgatgatggatatgactactttactacttacgatgaggtctaccagagctatgataaaatgggttagcaagaaaacatgctaagacgcatctatgcttacaggtccgagaag

SEQ ID NO: 50716 - DNA, 454 bp, Gossypium hirsutum
  Clone ID: LIB3197-027-Q1-M1-B3
cccacgcgtccggaaaaatattatgtaaataaataattacatcactaataaaaattcatattacacattattacttaattaaaaattataaattaacatatttttaataatttttaaaaatgatataacttaaaagttttattatatgctaattttagcttaatgtccttaacaataatttttcatccttatttagttgcatttgaattcaaacatatataataattggcctctctattgaatttaactggcccaaaaataacatgtttgtattattgtgaacaagcattgcatgatactttttgagcatgagcccttttttacttgcagactgcagttgtttttattaatcattcatcccattatagtacttccatttgtccttgaacactcattatttgcatcttctatcatattgagttatgatatgctgcttgtaaaaatataaatatag

SEQ ID NO: 50717 - DNA, 416 bp, Gossypium hirsutum
  unsure (1)..(416): unsure at all n locations; Clone ID: LIB3197-027-Q1-M1-B4
gtcggtcttctggatttattactaaactatttggattttggttctctacccaaattcagacaagcaaccggaaaaaagtgtcagttgtttcagttttcagacaaggaaacaaagcaggaaaatcgggtcagaaaaaaaaatgagagttaactggaaatcatggtcacttaacaaggaccatcttgggaagcttgcaattggcattctcttaatgggttttgcttttaagctcttggtttttcgttctaaaggatttggtgttgatttggaattccctgaggtagaaaaagagtatgttcaaaaaccagatttgaaatctcctcttcctgttcaaatacctgaaaatgatgatcaaatgcctctagatgttgntatagagaaatgtgatctttttaacaggggattgggttcccaat

SEQ ID NO: 50718 - DNA, 456 bp, Gossypium hirsutum
  Clone ID: LIB3197-027-Q1-M1-B5
gtcaaaacccttactggcaagacaatcaccctggaagtggaaagctccgacacaattgataatatcaaggccaagatccaagacaaagaaggtatccctcctgaccaacagaggcttatctttgctggtaaacaactggaggatggccgcacccttgctgactacaacatccagaaagagtctaccctccaccttgtccttcgtcttaggggtggcatgcagatctttgtaaaaacgctcactggaaaaaccatcactttagaggtggagagttctgatacaattgataacgttaaggccaagattcaggacaaggagggcatcccacctgaccagcagaggttaatttttgctgggaaacagcttgaagatggcagaacccttgcagactataacattcaaaaggagtctaccctccatttggtgttgcgtcttcgtggtggtatgcaaattttt

SEQ ID NO: 50719 - DNA, 455 bp, Gossypium hirsutum
  Clone ID: LIB3197-027-Q1-M1-B6
cggacgcgtgggtggacttgcaagtgaaccgagagattacgaatgcaatggtcttcacaagcattcaaaagcaatttcaactggtaccttgaccttaggtctgcttaccactgtcctgtcagttgtctactctgctgttcgtgctgggtcttcaacaactttactctccccaccaagctcgcctcgtgcaggaaagcctttgcttccaatggacaaggcagatgaacacgaagaaaaagagaagaacaagccggtctcctattcatatgccttcttccacataatcttttctcttgcaagtatgtactcagcaatgcttttaaccggatggtcaacctcggtcggagaaagcggcaagttagtcgacgtaggatggccatcggtgtgggttcggattataactgggtgggcaacagcaggtctctatgtatggtctctagttgctcccattcttt

SEQ ID NO: 50720 - DNA, 399 bp, Gossypium hirsutum
  Clone ID: LIB3197-027-Q1-M1-B7
tctttttcaagcctaagcttgttctgatttgactccctcctaacgctgccttctacagatcacagtacctgaagaaaacccctttttcccctcctattctcttctactatttaaccctcttacaattaccatctgcctacccaagtttctttaattatttcttttttgctcttatcaaaggagaatcttgtattggaggcattggttctccatgggtgaagccccggcattctgttttgacaatctacaaaatggatttggtttaaaacccaaaggcttggagacctctgccgacgttggtgacaaaacgtttgtaattggtggggcagacaatgattccacatcatatattggggttaagatttatgacaaatctacaggcaaatgggtgatccctac

SEQ ID NO: 50721 - DNA, 418 bp, Gossypium hirsutum
  Clone ID: LIB3197-027-Q1-M1-B8
ggaagttatggggttgggtcctctctctgactatgagcaggcaggtttggagagccttaaaccagaacttaaagcatctatagagaagggaatcaagtttgccaaccagaattaaatttatattatttgagatattcttccattagaacaatgaaaattttgcagttacttcggctgctattggtgttttttttcttgcagcaagcagcatcggctttgctgttgttaataggatagccataccataagtttccactaataattcccagtggtatgttgcaggaagtgtgtgattaaaaacccgtttttgtttaggtgggggatgtttaattacaaaccattttaaaattgtgatattacatttaatcttccacgattattccgtctttggtggtgacgaaagcttactttttatcct

SEQ ID NO: 50722 - DNA, 409 bp, Gossypium hirsutum
  Clone ID: LIB3197-027-Q1-M1-B9
atcgacaatccccacccagcagctaacttctggtttttatttttgttcttcagtctgaaaatcagtgagagatcgaagagatggcctttttccttggacaaagtagccttgcgaaccacttccgatcttatcagaaggcagaggcttccatggctgtgccaacacgagcatttcatgttgaacttggggatcgtgagaaagctctcttggcaaaggacccttcgttaagtcgttttaaatcttataagaagagtgtgtcgacactgaagagaattggggatgttcttacagttgttgttgtagcaggttgttgctatgaaatttatgtcaaggcagtaatgcgagaagaagctaggaacaaggcaaaggctggtggtggaaggtaatgaggttgtgcaagctttggcct

SEQ ID NO: 50723 - DNA, 440 bp, Gossypium hirsutum
  Clone ID: LIB3197-027-Q1-M1-C1
cggacgcgtggggttcgatcgacatcaactggaaggtgatcaatgtctcttcgtgcagcaccacctgtaccgccgcccaataaaacatcactgaggactgctgtatctctaccttctgagtctccgaaaaaccgacaaccagagaaaagattcacatcagacattgggtttaacttgaaagatacaggagattaccgtgaggcttctgcacttcgagatgaactagatatgctgcaggaagaaaacgagaatgtcatagataagctcagacttgaggaagaaaggtgccaggaagtggaggctaaagtcaaagagcttgagaaacaggttgctgctcttggtgaaggggtatctttggaagccaaactgttaagcagaaaagaggctgcattgcgtcaaagagagggttggccttatggatgcaaaacaaacttaggatg

SEQ ID NO: 50724 - DNA, 423 bp, Gossypium hirsutum
  Clone ID: LIB3197-027-Q1-M1-C10
ctcttaatgggtgtgaaaagggcagaaaagcagccaacttctctgcttttaaataaactttgattaactcttcaaggaatttatgatgcttgcttgcatatgggggggatctataaaccaagctattttgcaaattccaaggtcctctctatttgcaagaaagctaaatcccatgaatacatgatgtttgactcttcacttgatcaatctgctataagccaaaatgattgtcagctagatattgttagtgaacttcaagacaataactcatcgatagaggaaacaagtactaatgaaaagactggaagtgttgaatcatgttctaaaagcactgatttttatccttacaggtttccacttgagcaagatgtacatagattgcaacaaatacttgcaagaagatatagacttgcattctgtttt

SEQ ID NO: 50725 - DNA, 451 bp, Gossypium hirsutum
  Clone ID: LIB3197-027-Q1-M1-C11
gagaatgcggtttttgtagaaatgtgcagagatcacaggatcaactttattgggcctaaccctgacagtattcgtgttatgggtgacaaatcaactgcacgagaaacaatgaagaacgcgggtgttcctactgttccgggaagtgatggattgttacagagtacagaggaagcaatcaagcttgcccatgagattggctttcctgtgatgatcaaggccacagcaggtggtggaggacgtggaatgcgtctttctaaagagcctgatgagtttgtgaagttactgcagcaagccaaaagtgaagctgcagctgcatttggaaatgatggagtttatttggagaagtacatccaaaatccaaggcacattgagttccaggttcttgcggataaatatggtaatgttgttcactttggtgagcgagactgcagcatccagagacgtaatcaaa

SEQ ID NO: 50726 - DNA, 235 bp, Gossypium hirsutum
  Clone ID: LIB3197-027-Q1-M1-C2
ttcttcatcctccagcaatgaatggcgtacaaattgggagattttgatttggatttccctattcgggattcttgatacattgtccattgagagtggattctaagcaaagtctcgtctcacattatattcaaagaaaaaaaagttacctcgattcttgttcatccaacagttggacaacaacagcgacaacgacaaccaaaaagttatggattaaaccaagcactgaactgaattg

SEQ ID NO: 50727 - DNA, 456 bp, Gossypium hirsutum
  Clone ID: LIB3197-027-Q1-M1-C4
cccacgcgtccgctgaaagtcagttactatggcgaacatctttacttgaataatcagcaagtgatgttattttattcctaccttgttttctttatttggatttgcccaacactgatgccaagttgagtagaagaagtaggggaaagagatagaataggcagaaacagttagggaggaacaaaggaaattgagagacaaagaactagcggaggaagcctgaaagatttaatggtaattaaatcctataaaatggaaacagaggagttagaattttttagcaacgtctttgagatctgaaggtaaaagattttggagtaaatgaggtgaaaagtgagaggagtatagataacaagccttctctaccttatttgggaatggagagtagagtagagtaaagctaggagggggttacgtgcctaatatgttgtatataaaccgtaactaaaataagttttc

SEQ ID NO: 50728 - DNA, 449 bp, Gossypium hirsutum
  Clone ID: LIB3197-027-Q1-M1-C5
cgctcttagggttgttgctcaagttcagcctcgagtgctcccgaaataacaatgagggaaatccttcacgtgcaaggaggccaatgcgggaaccaaatcggatccaagttttgggaagtgatctgcgacgagcacggtgttgatcctaccggaaagtacagtggagatggatcatccgatattcaattggagcggatcgatgtgtattacaacgaggcttccggtggaaggtacgtccctcgtgcggtactcatggatcttgaacccggtaccatggatagtatcagatccggtcccattggccagatctttagacctgataatttcgtgtttggacaatccggtgccggaaacaactgggccaaaggtcattacactgaaggagctgagttgattgatgctgttcttgatgttgttcgtaaagaggccgagaattgtgattgcctgca

SEQ ID NO: 50729 - DNA, 454 bp, Gossypium hirsutum
  Clone ID: LIB3197-027-Q1-M1-C6
gcttttaacacctttttcagtgaaactggtgctggaaagcacgtccctcgtgctgtctttgtggatcttgagcctactgttattgatgaagtgaggactggtacttaccgtcagcttttccaccctgagcaactcatcagcggcaaggaagacgctgccaacaacttcgcccgtggccactacactattggcaaagagatcgttgacttgtgcttggaccgtatcaggaagcttgctgataactgtaccggtcttcaaggtttccttgttttcaacgctgttggtggaggcactggatctggtcttggttccctccttttggagcgtttgtctgttgattatggcaagaaatccaagttgggtttcactgtctacccatcaaccccaggtctccacatctgttgttgagccctacaacagtgtcctctcaactcactcccttttggagcacact

SEQ ID NO: 50730 - DNA, 430 bp, Gossypium hirsutum
  Clone ID: LIB3197-027-Q1-M1-C7
ccaagatggaggccagcagcagcacctcccatgacccagcattgttccatgctcccttgctacaccaccctcggaggaggagcagcagacccttaaagggtttcgcagtgatatttgggtccgtcgttttcctactctcactggtcatattaatcgttaaccaaagcccggagccattagcaagtaaccccagtagtgtaacggaggcagggtcgtattcaatggcggcgcagccaagagggatagctgaaggagtttcagccaagtcaaacccatcactttttgacaaagttgggtttaattggacaaacgctatgttttactggcaaagaactgcctaccactttcagcctcaaaagaattggatgaatgatcctgacggtccgttatatcacaagggatggtaccatcttttctatcaatacaaccc

SEQ ID NO: 50731 - DNA, 406 bp, Gossypium hirsutum
  unsure (1)..(406): unsure at all n locations; Clone ID: LIB3197-027-Q1-M1-C9
gtcagccaattgtttgagctagctagctcttactcaaatggcaaccaaaacgatgatgttgcaaatatttccacttttcttctttttgttcagtgtctgcaactccattttccttggtgctaatggagatgacaatggtggttggcaaactgcccatgccaccttctacggtggtgctgatgctaccggcacaatggggggagcttgtggttatggaaacctgtacagtcaagggtatggaacgagcacagcagctttgagcactgcacttttcaacaatggcttgagctgcggtgcctgctacgagctccggtgcaacaatgatcctcaatggtgcattagtcgaaccataaccgtgacagccaccaacttttgtccacctaactatgctntatctagtgacaat

SEQ ID NO: 50732 - DNA, 453 bp, Gossypium hirsutum
  Clone ID: LIB3197-027-Q1-M1-D10
ggatattcaagagaaaaagaaaaacttagttccagaaagcgagtttgttgatgtactgttcaacgagccgttggagtcttcaactgttgaacagatgtttcttatgggtatgaacacttgtgaaggtgtggatattcttgatataagaccctgctccagtacacaatatagattagagcgtttccagaagcaggtccaaattatgaagaagtatcgggggactgcaaatgttcaacgtgcatggcttgcttcctctagaaaagcattgcctaccatcatgatgcatgggcttgcagactgccgtctttcttcaatcccagacctatatgccgctggtgttcatcttgctgcagcagaatttactaatggcagtgcaaagtattgtgatgttgacgaaaatggagtacagtacatgatattatgtcgcgtaataatgggaaaagatggagcttt

SEQ ID NO: 50733 - DNA, 434 bp, Gossypium hirsutum
  Clone ID: LIB3197-027-Q1-M1-D11
gtcgaaggaagtgagtgaagaagggatgagccgaaaggactatgtggatcctccaccggcaccgctcatcgacgtggctgagatcaagctttggtctttttacagagctctcatcgccgaattcatcgctactctccttttcctatacgtcaccatagccaccgtcatcggccacaagaaacaacacgatgcatgcgatggtgttggtcttttgggtattgcttgggcttttggtggcatgattttcattcttgtttactgcaccgccggtatctcaggtggtcacattaacccggcggtgacatttgggttgtttttggctaggaaggtgtcgcttataagggcggtggcttacatggtagctcaatgtttgggtgctatttgtggtgttgggttagttaaggcattcatgaagagtgaatacaactcccttg

SEQ ID NO: 50734 - DNA, 451 bp, Gossypium hirsutum
  Clone ID: LIB3197-027-Q1-M1-D12
gttccatttctattagcatgtctttgcatcaaacaagcttttgcttcgtctgtagtcacttaacatccgggcaaaaggagggtgatgagctgcgaagaaactccgatgttatggagatcctaaggaagacaaggtttcccagggttcatggtatgggagacgaaacttctcccgaaacgattctcgagcatgatcgtattatatggcttggggatttgaattatcgtatagctctgtcataccgctctgccaaagctctggttgagatgcgcaaattggaaggcactgttagagaacgaccagcttcggatagagcagaggcaaggccgtgtttttgaggggtggcgtgaaagaaagatatatttcccccctacatacaagtattctaataattcagacagatatgctggggaggacagacatccaaagaagaagagaagaactcctgcat

SEQ ID NO: 50735 - DNA, 436 bp, Gossypium hirsutum
  Clone ID: LIB3197-027-Q1-M1-D2
attttctctccctaaacacctcattttcctgagaaaaaaaaaacaaaaaagaagcgtaagtgaagaaggagaagaagaaaaaagaaaatggcggaccagcttaccgatgagcagatctctgagttcaaggaggcctttagcctctttgacaaggatggcgatggttgcattactaccaaggaactgggtactgtaatgcggtcactcggacagaaccctactgaggcagaactccaagatatgattaatgaagttgacgctgacggaaatgggaccatcgatttccctgaatttctcaaccttatggcaaggaaaatgaaagataccgattctgaggaggaacttaaagaagctttcagggtgttcgataaggatcaaaacggtttcatatctgctgccgagcttcgtcacgttatgacaaatcttggcgagaagc

SEQ ID NO: 50736 - DNA, 451 bp, Gossypium hirsutum
  Clone ID: LIB3197-027-Q1-M1-D3
gcgaatatcctcctttttgcgcccttcatttccagagagagagaaagagcgttccaacaatcttcgtctctttctctcgcttgccgtttttctctcttaggttttgattcttctttgtagttcgaggtgttttaaagacaagtcaagatggtgaagtttacagctgaggagcttcgtgccattatggacaggaagcacaacatccgtaatatgtctgttattgctcatgtggaccacgggaaatcaactcttaccgattctcttgtggctgctgctggaattattgcacaagaagttgctggtgatgttcgtatgacagatacccgtgctgatgaggctgagcgtggtatcacaatcaagtctactggtatctctctttattatgaaatgtctgatgactctttgaagagctacaaaggagagagacaagggaatgagtacctcatcaatc

SEQ ID NO: 50737 - DNA, 444 bp, Gossypium hirsutum
  Clone ID: LIB3197-027-Q1-M1-D4
gcaaaggagatccattactaacccatcaccagcagcgagaatggctaaacaagcctcacgactcctccgatctttgtcattcgaggtttctcatcacaaatccctactcagtcctcaacattcacgggcgttctaaggagatccggcgcctgaaccggcggttttcgtagacaagaacacactcgttatttgccaaggcataaccggaaagaatggtacttttcacaccgagcaagccatcgaatatggcactaacatggttggtggagttacaccgaagaagggtggcacagaacacttatgactttctgttttcaactcagtagctgaagcaaaagctgaaaccaaggccaatgcttctgtcatatatgttcctccccctattgctgcggcggctatcatggaggccatggaagctgagctggaacttgttgtttgtatcac

SEQ ID NO: 50738 - DNA, 457 bp, Gossypium hirsutum
  Clone ID: LIB3197-027-Q1-M1-D5
caaaaacttgtttaattaccaaaaagttaagagcaaaagaaagagcagagtaagctaagctttgatcatcaatggcggagaagagtttcaagtacgtgatccttggcggtggtgtagctgctggatatgcggcgagagagtttgccaagcagggagtgcatcctggtgagctagcaattatttccaaggaggcggtggctccatatgaacgacctgccctgagcaaagcatatctcttccctgagggagctgcaagacttcctggtttccatgtctgtgttggaagtggcggagagagattgcttcctgagtggtacaaggaaaaaggaattgaattgatccttagcacagaaatagtgaaagcagatcttcctgccaatactctagtaagcgccactggagaaacattcaagtatcaaatcttgatcattgcaactggttcaacggttatcaaatt

SEQ ID NO: 50739 - DNA, 373 bp, Gossypium hirsutum
  Clone ID: LIB3197-027-Q1-M1-D7
ctctgagggtgtcttaataaacgccttcgatttactttcggtttccatttacttctttatttctacgtttttgaatttttagtaagcgaaaatgagagagtgcatttcagttcacatcggtcaggctggtatccaagtcggaaatgcctgctgggagctttactgccttgaacatggaatccagcctgatggccagatgccaagtgacaagactgtcggaggaggtgatgatgcttttaacacctttttcagtgaaactggtgctggaaagcatgtccctcgtgctgtctttgtggatcttgagcctactgttattgatgaagtgaggactggtacttaccgtcagcttttccaccctgagcaactcatcagc

SEQ ID NO: 50740 - DNA, 439 bp, Gossypium hirsutum
  Clone ID: LIB3197-027-Q1-M1-D8
gattgtttcatgggcaatacatgccgtggatctttaaaggggaaacttcataagggcgacaatcagcccaaagaccattgttctagccgcaacaacacttcttccggccgttcaaccaccgccaccgattattccccttcaactttaaactctcaacaactgattgctcaagaattctccaaagaaaccaaccaaaaagaaacccatttgcctgtcattaaccctaccaagaaagacaacaacaataacaccatgagacgtggtattgatcaccaggcttactatgttttgggtcataaaacaaccaacatccgtgacctttacactttaggtcgtaagttaggacaaggacagtttgggactacttacttgtgtactgagatctctacaggcactgagtatgcctgtaagctatatccaaaagaaagtgatctcaatg

SEQ ID NO: 50741 - DNA, 441 bp, Gossypium hirsutum
  Clone ID: LIB3197-027-Q1-M1-D9
ctggatctggtcttggttccctccttttggagcgtttgtctgttgattatggcaagaaatccaagttgggtttcactgtctacccatcaccccaggtctccacatctgttgttgagccctacaacagtgtcctctcaactcactcccttttggagcacactgatgtggctgttcttcttgacaatgaggctatctatgacatttgcaggcgctctcttgacattgagcgacccacttacaccaatcttaaccgtcttgtctcccaggtgatctcctctttgactgcttcacttaggttcgatggtgccttgaacgtggatgtaacagaattccagaccaacttggtcccttacccaagaatacacttcatgctttcttcatacgctccagtcatctctgctgagaaggcttaccatgagcagctatcagttgctgaaatca

SEQ ID NO: 50742 - DNA, 400 bp, Gossypium hirsutum
  Clone ID: LIB3197-027-Q1-M1-E1
ctcttttcttctcaaattatcattcaccatctttctcgtcggttttgagatctcaagctgatttattacgttttaatataggttgagatggcttcgaccactctaatctgcgatacccagccatggaaggacttgaaggctcatactgaggatatcaagaaaactcatcttcgtgatttgatgaacgacaaagaacgatgcgaatcgatgatggttgagtttgatggaatgtttttggactactcaaggcattgcgccactcttgagaccatggataagctctattaaattagcagaggctgcttctctcaaacaacaaattaaccgaatgtatagtggcgagcatataaatagcacagaaaattaggcagtggcttatgtagctcttcgagcacccagg

SEQ ID NO: 50743 - DNA, 448 bp, Gossypium hirsutum
  Clone ID: LIB3197-027-Q1-M1-E10
gagaaagacgaagacgaagaagaagaagaagaagagcaaagcaaaaagaaagaaacccttattcaacatctccatccatttctctcccattaaaaccctactctgttgattatagagatataagggagataatatataatgggtggtgggaagagatttgctgttcttctgtgtgctgaggattccgagtacgttaaaaagaggtacggcggctactacggcgttttcgtggaaatgctggcggaggaaggcgagacttgggacgtgttcagggtggccaacggtgagttcccggacgacgaacaagttgaccgctttgatggcttcgttataacggggagttgcaatgacgcgcacggcaatgacgcttggatatgtcggctggtttcgcttttgaaaaagttggattctttgaataaaaaagtcctcgggatttgcttcggtcacc

SEQ ID NO: 50744 - DNA, 443 bp, Gossypium hirsutum
  Clone ID: LIB3197-027-Q1-M1-E11
gaaagaagtcaaatcaaaaactctaataaaaatgtcttccattgttcttagatctcgaacaatttcaaataatttcagttcaaagattatttctcaaaggggtttatgttcaggagtggtttcttcttcttcggatccttctaaaggaacaacaatttcttcacaatccattctctccgatcagtcgacacctcctcctctggcgccggaagttgccccacaggtttcgggagggaaaatttggagctttgtcaagtacggactcattgcaggtgttactggaactactggctatgctggttatctctcttataagtgttcatgtgaggaagtagatcataaagcaaaggcattgcgggctgcaacgagttatacttctatggaaaagcctctgctattgataaatatggaggcttgctctactctgctgcaatgacagttcc

SEQ ID NO: 50745 - DNA, 372 bp, Gossypium hirsutum
  Clone ID: LIB3197-027-Q1-M1-E12
ggggggcaggaatttcatattcaaaaacatatagaataactatcacacaaggattttactcaaggcagcaaaatccatagacataataagcaaaagtcgaaaacaccaccaaagatccaccataacaattatattcgaaaattcctacactacaaattcgtcctctgtcactcctccctacttgctatttaaatacgaaaatttttttaaagatagcacatatccaaatgggagtgaatgaaaaagcaacagaaattgttgatagctctgtggcaagggaaacccctctattcaaatgcatcattgtcatcatctggaaggggctgactggctgccgctgcaagctcaacctaatgttctagatcgcgagtc

SEQ ID NO: 50746 - DNA, 410 bp, Gossypium hirsutum
  Clone ID: LIB3197-027-Q1-M1-E2
ctctgttaaaaggctctttgttctctgtttcgtatttctcttaaaactctacaatggctaaaacctttgcttgctttgtcctattagctttcatagttagttgcgcacttggtcaggctcctagctcggccccaaccaattcaccgccgtcttttaaccctactccggctcccaaggtttctccaaccatgtctccaaccgctacaccaaccgcatctccgccgtcaacatccactcccccgtcttcagcccctgaatcttcaccaacttcctctcccactacttctcccccagctcctctcgctggttctcccgctggctctccccctaccgctgattctcccacgaactccatcagcgagacaccaggcagctctcccacttctcctacgagtgcagccgcttggaac

SEQ ID NO: 50747 - DNA, 453 bp, Gossypium hirsutum
  Clone ID: LIB3197-027-Q1-M1-E3
ctctgttaaaaggctctttgttctctgtttcgtatttctcttaaaactctacaatggctaaaacctttgcttgctttgtcctattagctttcatagttagttgcgcacttggtcaggctcctagctcggccccaaccaattcaccgtcgtcttttaaccctactccggctcccaaggtttctccaaccatgtctccaaccgctacaccaaccgcatctccgccgtcaacatccactcccccgtcttcagcccctgaatcttcaccaacttcctctcccactacttctcccccagctcctctcgctggttctcccgctggctctccccctaccgctgattctcccacgaactccatcagcgagacaccaggcagctctcccacttctcctacgagtgcagccgcttggaacagagtcaccgtcgctggatctgccgttgcagtcgtttttgctg

SEQ ID NO: 50748 - DNA, 454 bp, Gossypium hirsutum
  Clone ID: LIB3197-027-Q1-M1-E4
atttcatctgccatcaatttgctttgaagatcatgttggctatttttcacaaggcatttgctaatccaccagaggagctgaatagtccagcttctcataaatctactaagaagcctaaacagcctgaagaaaccctaaatgatttcctatctcatcaccctcacaacactttctccatgagctttggcaacgctgctgttttggcttatgtccgccatgaacgtgctgcttcagttcatcagaggttgttttgtgggtttgatgacatatactgccttttcttagggagcttgaacaatctatttatgctgaatagacagtatggtctttccaaagggagcaatgaggcgatgtttgtgattgaagcatataggacactaagggataggggtccataccctgctgatcaggttgttaaggatcttgaaggaagctttgcctttgtgatctatga

SEQ ID NO: 50749 - DNA, 457 bp, Gossypium hirsutum
  Clone ID: LIB3197-027-Q1-M1-E5
gttgaagtagtaatatctatagcatacagagatggagaggcaaagaagcaagcaggtttgtttgttgatgtgggttttggttgctgcctttttctcccacaatagggtcattgcagtgacctccactggccttggtgagcagaaaaactactatccagctcctgaccctcatgctggaactcccccttcaggttcacatggcacaccaccatcttcaggaggtggatcacctccctctcatggaaccccgtcacatggaggtggttaccacccttcaccaacaccatcaacgccttcgggtggaaattgtggaactcccccacatgacccttcaactccatcaacaccatcacacactcctcctcatggtactccaccatcatctggaggtggtagtcccccatcgtatggaggaggcagtcccccatcgtatggaggaggcagtcccccatcgtat

SEQ ID NO: 50750 - DNA, 455 bp, Gossypium hirsutum
  Clone ID: LIB3197-027-Q1-M1-E6
aaacggagcagtttacggaagggactcttaaaacccagccaaaccacatacagttcctcctcagaattcacctactctatacgttgaataaaacaagatggggggtgggtttagagtgcttcatcttgtaagaccgtttctttcatttctgcctgaagttcagagtgctgacaagaaagttcccttcagagagaaggtcatatacactgtgatctctcttttcatcttcttggtttgtagccagctccctctgtatggcatacattctactactggtgcagatccattctattggatgcgtgttattcttgcctcaaatcgtgggactgtcatggaacttggaatcactcccattgtgacgtctggactggtgatacaacttcttgctggttctaaaatcattgaagtggacaacaatgtccgcgaagatcgtgcccttctaaatggtgcccaaa

SEQ ID NO: 50751 - DNA, 445 bp, Gossypium hirsutum
  Clone ID: LIB3197-027-Q1-M1-E8
cccacgcgtccggaggtttagcatactatgttactgcacctgcaggcttagcggacatggcagcaaatcccttccatgctctattttatcttgtgttcatgctttcagcatgtgcgttgttttcgaaaacttggattgaagtttcaggttcttctgccaaagatgtggctaagcagctcaaggaacaacaaatggtgatgcctggacatagagattcaaatctacagaaggaactgaatcgctacattccaactgcagctgcgtttggaggaatgtgcattggtgcattaactgtcctagccgacttcatgggagcaattggttcgggtactggaatattgcttgccgtaacaatcatatatcaatactttgaaacttttgagaaagagaaagccagtgaactgggtttctttggactctgaagcttctagtcatgaaatttttg

SEQ ID NO: 50752 - DNA, 376 bp, Gossypium hirsutum
  Clone ID: LIB3197-027-Q1-M1-E9
attatacattattggcttgaaattgggggcggtgctaaaagggggctggggctgtgccttttctagctctttgctcttgctctttctctaccatcaattacagctagaaggagacagtttccattaagaacagctatggcgggttccactagcggaaccacttcttccaatccatcattgaacccttctgctcccaaaatcctattatccaagccatcagctgggctgtttcctggttaatttggacgctgaggttgtgattatgaaacggctcctgatagggcccgtttccctcccgttggttcccttaaccttctttctgattcctgggaattccacatcgatcgtattttgccttttttgactgagaatactg

SEQ ID NO: 50753 - DNA, 409 bp, Gossypium hirsutum
  Clone ID: LIB3197-027-Q1-M1-F1
ctggtaacctttttcttctctttctcttatggcggtttttggatttataaaaacatagcgtttaggcttttagattcatttgtgttttggtgctgtggaggtgcatggggtgtaggcaaagttcataatattgatattgggatccttgggggcgttttccatccatttccaccaaaattgcagggagcgttttgcttcaaatgaaaaggccttaatatgcattcttagtattagtattcttcacctgctccttgtactttctcttggattctagtggttttctctttcatatcatttgattgggatcagtgagaaaatggaaggagatatcaaccagaagctgctaacagagactactaagaacgaagaggaagaagtgctatttaaagaaagattatggaccgagatg

SEQ ID NO: 50754 - DNA, 436 bp, Gossypium hirsutum
  Clone ID: LIB3197-027-Q1-M1-F10
gctctttcaattttaagaccaaatcacgagcgactctcagactcagctgagttaagatcgctaaagcgatatggctttgcagctatgggaaacgttgaaggaggcgataacggcgtatacgggtctatctccggccacttttttcacggttctagctctgttatgggctgtttactatgtagcaacgggtctattcgggtcatccgatgaccatatccatcaacggtctacggctttcgaggagcagatggagccgctaccgccaccggttcagctcggcgagattaccgaggaggaacttaagcagtatgatgggtcggattcaaagaaaccactccttatggccatcaagggccagatctatgatgtttctcaaagcagaatgttttatggacctggtggaccttatgcgttgttcgccggaaaagatgcaagc

SEQ ID NO: 50755 - DNA, 449 bp, Gossypium hirsutum
  unsure (1)..(449): unsure at all n locations; Clone ID: LIB3197-027-Q1-M1-F11
gcagcttgatcatttattgttcaagatggctcctactggtgtaagaacagaggagtggatcgaaagaaactcaaagggattggagattttctttagacgatggatgcctgaacccggggttaaaattaagggtgtcgtatgcttttcccatggatatggtgatacttgcactttcttctttgaaggcattgctaggttcattgcagcatctggatatggtgtttatgctattgatcatccaggattcggtctttctgaaggattgcatggttacatctatagctttgatgaattggctgacaatgtcattgaacaatatgcaaaaattaaagaaagacctgaagtgagaggattgccctgcttcatattgngacagtccatgggtggagctgttactctcaaagttcaatttcaaggatccacatggatgggatggaatcatccttgta

SEQ ID NO: 50756 - DNA, 440 bp, Gossypium hirsutum
  Clone ID: LIB3197-027-Q1-M1-F2
gaactttcatcggattccgacggcgaacctagttggtgagtctcttcccgccacgccccctcgtcggaggagtagacccagggcggcggtggtcaaggattacgctagtgaaaacgaagctcagagaccgagagggcggcggagcaaggatttgaggaagaggagagttataaagggaagatggattgataaagaaatgggttgtaaacatgaagggaagaacaaaagtgggttgtactacaattacagccatagcaattacagtgggagttttagtggtgaaagtgaagggggtgtagtggtgattactagacctaaaggtggaaaacgatcgttgtgtatggatatggaggaagggaaagcatgtacggacttagggttggaattggagatgcctggtcgtgtctcattatcaggttccgccattgataatactagta

SEQ ID NO: 50757 - DNA, 448 bp, Gossypium hirsutum
  Clone ID: LIB3197-027-Q1-M1-F3
ggagaaccctaattttgtctctcccaagagacgaaaggaagggaaaaatggtgttttacttcaaagcccggccagaagctggcgattacaccattttcatgggtcttgacaagtacgagaacgaggagctcatcaaatatggcttcatcgaagatatctggttccatgtggataagatgtcttctgcccatgtttatttaagacttaaaaagggtcaaaccattgatgatataagcgaaggcgttctcgaagattgtgttcagcttgttaaagctaattccatccaaggcaacaaggtgaataatattgatgttgtttacactccatggtccaatttgaagaaaactccttcaatggattgttggtcaagttggctttcacaattccaagatggttcggactgtgagagtggagaagcggataaatgagatagttaacaggttgaaca

SEQ ID NO: 50758 - DNA, 451 bp, Gossypium hirsutum
  Clone ID: LIB3197-027-Q1-M1-F4
gtcaacttgtatgaaggatgttccctctatgctcttgcagatgttggaggaagagttcaattttctaatcaataaaaaggatcagatgaacattgaaacaaagatcaggaatattaggtttattggagaactttgtaagttcaaaatttcatcacctggccttgtcttcagttgtctgaagacttgtttagatgatttcactcatcataacattgatgtcgcttgcaatcttcttgagacgtgcggtcgttttctgtatcgttctcctgaaactaccataagaatggctaacatgttggagatcttgatgcgcttgaaaaatgtaaaaaatttggatcctcggcacagcacacttgtggaaaatgcttactacctatgcaaaccacctgaaagatctgcacggatctccaaagtccgtcctccattgcaccagtacattacgaaattgcta

SEQ ID NO: 50759 - DNA, 421 bp, Gossypium hirsutum
  Clone ID: LIB3197-027-Q1-M1-F5
gctgaaaatctggttctacttggcgatgctttgtttcgggagagagagtatcgtagagcgattcatacgtacaagcaagccttgcagtattataagattattcccaagcaaaattctacatcttctagaagtgcattgtctgcctcaaacaggtcctcttctccaaattcttttaacatttgtgctataaatgaaaacgaggtgaagttcaaaattgcttcttgtcattttgctttaagtgaaaacaaagtggctcttgttgagatggagggaattcctagcaaagcaagaaatttgcagatgagtttattgatggcaaagctttatcgaaatactaaacatacccgtggtgctgttacttgttacagggaatgtttaaggcaatgcccttatgtcattgaggctatcatagccttggctg

SEQ ID NO: 50760 - DNA, 424 bp, Gossypium hirsutum
  Clone ID: LIB3197-027-Q1-M1-F8
aacatattgggtttccttttcttgatattggcttcactaacaagcctctcttctagccttcctagtgaatactccatagtggaacatgagattgacgcatttctttcggaggaaagggtgttggagatcttccaacagtggaaagaaaagcatcggaaagtgtaccggcacgccgaggaggctgagaaaaggtttgaaaatttcaaggggaatttgaagtatatcctagagaggaatgcaaagagaaaagcaaacaaatgggaacatcatgtgggattgaacaagtttgctgatatgagcaatgaggagttcagaaaagcttacttgtcaaaggtgaaaaagcccatcaacaaagggataaccctgtcaaggaacatgaggagaaaggtgcagtcttgtgatgcaccctcatccttggattgga

SEQ ID NO: 50761 - DNA, 381 bp, Gossypium hirsutum
  Clone ID: LIB3197-027-Q1-M1-F9
cttttatttttccttctctttctcatgctttcttcaattaataaccaatcaaagtgctctctttgcttttccctgttttataagtcatcgaactgttgtttttcttgatctctccatcattcccgtttctgggtttttttgttttttttttttgagtttttagtaggtagccatgaatgctcttgctgcaaccaaccgcaatttccgactggcgtctcgtttacttgggttagactctaagcttgaaaagagtcttctgatcccttttagagaaatcaaggtggagtgcacgattcccaaggacgatggaaccttggcgacttacgttggatttaggatccaacatgataatgctcgtggcccgatgaaaggtggaatcag

SEQ ID NO: 50762 - DNA, 317 bp, Gossypium hirsutum
  Clone ID: LIB3197-027-Q1-M1-G1
gcgatttgcaatctcaactcaccgtttctcacgattggattctccttaaaatcatggctgctcagattagcaagaagcgcaagtttgttgcggatggagtgttctacgcggagctaaatgaggttttgacaagggagcttgctgaggatggatactccggagttgaagtcagagttactcctatgcgtactgagatcatcatcagagctactcgtactcaaaatgttcttggtgaagagggtagaagggattagagagttgaactctgttgttcagaaacgaatcaagtttccggagaaacgtgtggagctctatgc

SEQ ID NO: 50763 - DNA, 446 bp, Gossypium hirsutum
  Clone ID: LIB3197-027-Q1-M1-G10
cctttcttcgacttttctctgtttgcttccgtcacaactcaaaaaccgtacacaaaatgggcaaggatctgagcgacgagcaagtctcatcaatgaaggaggctttcactctcttcgacaccgacggtgacggcaagatcgctccatcggagctagggatcctaatgaggtctctcggcggtaaccccacccaagctcaactcaaagctattatcgctgaagagaagctcacggcgccctttgacttccctcgcttttttgatctcatgtccaagcatatgaaacctgaaccctttcgataggcagctaccccgatgctttcaaggttctggataaggacaatactggctttgtctccgttgcagatctgagacatatactgactagcatcggagagaagctggagccctccgagttcgatgagtggatcaaggaagtggatgtcg

SEQ ID NO: 50764 - DNA, 358 bp, Gossypium hirsutum
  Clone ID: LIB3197-027-Q1-M1-G11
agtttctgcaccacaactacataggggagagtgaacactaaaaaacgggacacaaaattggcaattatcttactgacttgcatgtcttattaataaaggaggctttcactcttttagacactgacggttatggaaagatcgttccatatgagtttatgatactaatgaggtgtatctacggtaaccgaatccaatctaatgtcattatctattatttgttaatagaatctcacggtgccctttgacttgcttcatttttttgattcattgtacaagcttatgaattggtgggccgcatttataggaatgttacactatgcttttaaggtttctgtatattgacaatactggtcttagt

SEQ ID NO: 50765 - DNA, 406 bp, Gossypium hirsutum
  Clone ID: LIB3197-027-Q1-M1-G12
cgacaaagatactctttgggaatttcagccgaaaaaaataggtgagggggaccttttaactggtggcgacctttatgctaccgtctttgagaacagtttgatgcaacatcatgttgcccttcctcctgatgcaatgggaaaaatcacttacatagctccccctggtcaatattcattgaaggatactgtgctggaacttgagtttcaaggtgtcaaaaagcaattcaccatgcttcagacatggcctgtccgtacacctagacctgttgcaacaaagcttgctgcagatactcctctgcttaccggacagcgtgtacttgatgccctattcccttcggttcttggtggaacttgtgccattcctggtgcatttggctgtgggaaaactgtgattagtcaagctctt

SEQ ID NO: 50766 - DNA, 395 bp, Gossypium hirsutum
  Clone ID: LIB3197-027-Q1-M1-G3
gaaccttcaacattaaatattttatcattaataaaaaaataaatattaaaggctaaatttaacactaactgtaacagttgaacaggtctatctgagatcaatctggaaaactttagcgtctctaattctgaattacatttttctgaaattttagattttaagaagcggacaactatatagaaagcaagcaactgggaagggctatcccaaatgccatacgggagatgagtggccatcggagtcccgatagcaattgtgggcagctgccaatgtgatcccaccaaggttgtcagtttttgaccttcatccacccatcatgcaaatcacgatccacatgtttctttaccacttaaaacattccacttttcaaattaccctttatgactactcaaaat

SEQ ID NO: 50767 - DNA, 376 bp, Gossypium hirsutum
  Clone ID: LIB3197-027-Q1-M1-G4
ttcagtgtctcactctctccgtgcttcactccagtttctcctttccctcttcgaagaaaaaatgcgtgagatccttcatattcaaggtggccaatgcggcaaccaaatcggagccaagttctgggaagttgtttgtgctgagcatggcatagatgcaactgggcgttaccaaggagacttggatcttcaacttgagcgaatcaatgtctactacaatgaacccagttgtggtagattcgttcctcgtgctgttctcatggatcttgaacctggaaccatggacagcatcagatctggccctgtcggtcagatttttagaccagataacttcgtttttggtcaatctggtgctggtaacaaccggggctaagggcca

SEQ ID NO: 50768 - DNA, 378 bp, Gossypium hirsutum
  Clone ID: LIB3197-027-Q1-M1-G5
cgaaacttcaaacaaagggaggaatgtgtttttggattggacgtgctcaaagaacaaagataaaaacttgaatgagatcatgacttggcttgagtggatcttatctcacacgcttttgcgtactgctgagagcaacccacaaggtcttgataatttctggcttaagcaaggggcagcattattgctaagcttaatgcagagctcacaagtggatgttcaagaaagggcagccactggactagcaacttttgttgttattgatgatgaaaacgcaagcatagatcgtggaagggctgaagcagttatgcgagatggtggcattcggcttcttctgaacctagcgaagtcttggcatgaaggacttcaatcggaggctgc

SEQ ID NO: 50769 - DNA, 411 bp, Gossypium hirsutum
  Clone ID: LIB3197-027-Q1-M1-G6
cccacgcgtccggctaatggaaaaaagtgaaaagggtaatggtgttgctcctgctacaaggtctccaatggctttaatggggtcatctagaaatgaaaaccaagaagtgaataccagcatgagaactgccgagaccatgctgcggttggtgcctatggctttaggggttgctgcacttgttgtcatgctcaaaaactcacagtccaatgactttggctccgtttcatactcagatcttggtgctttcaggtacttggtgcatgctaatggtatttgtgcaggctattcccttctttcagctattatagcagctgtgcctagtccttctactatgcctagagcttggactttcttcctactcgatcagattctaacatacgtaatcttgggagctgctgctgtttcaaccga

SEQ ID NO: 50770 - DNA, 387 bp, Gossypium hirsutum
  Clone ID: LIB3197-027-Q1-M1-G7
atggttactaagcatgcagcggaaaatccagggaaatacaacattcttggcacaaatactattatggataaaatgatggtggcaggttttaagaagcaaatggcagatactggaaaactgaacacactgttgcagagagccccacagtgtcttgggaaatttattgagattgctgcccgaaagaagcgaaatttcattctggatcagacaaatgtgtctgctgctgcccagaggagaaaaatgtgcctgttcgcaagcttccaacgaaaaagctgttgagtgtgcccaaaagatgaagactataagcaaagaacacagaagaaagcagaagtagaggggaaagacttaccagaacatgcggtcctcaaaatgaaaggaaactttacc

SEQ ID NO: 50771 - DNA, 391 bp, Gossypium hirsutum
  Clone ID: LIB3197-027-Q1-M1-G8
gttgcaatcttcctcttacactcctgctattgatatgtgggctgttggtgctatattagcggagctttttacttcatctcctatttttcctggtgaaagtgaaatagatcaactgtacaagatatgctgtgttttgggtgcgcctgattggacttcctttcctgaagcaacaaacatctctcgtctaatcaatattagttattcagagattttacctaccaacctatcagatatcattcctaatgccggcccggaggctgttgatttaatcatgcaactttgttcatgggatccattaaggaggccaacagcagatcaggcattgcagcatcctttttttaatgtggatgctcgcattcctcatccacgactgcatgatccacttgagctc

SEQ ID NO: 50772 - DNA, 389 bp, Gossypium hirsutum
  Clone ID: LIB3197-027-Q1-M1-G9
ggcttctttaagctattaccaataatggagtgccagatatccttattccagctcctcatcagcttcctcctgtttttgtttatggtaatcacaagtgtaaggagatcaaaagctaagaatttaactcaaaagttgattccagggccatggaaattaccattgataggaaatctgcaccagctcgccgcttctggtctaccccatcgcaccttacgtgacttggctacgaaacatggtggcttcatgcatctgcaactcggtcaagtttccaccgtggtcgtttcttctccagaaatggctgaagagattatgaaaacacatgatatcgtctttgctaataggccttttctcgttgggccaagatgacaacttatgagtgcactgatatt

SEQ ID NO: 50773 - DNA, 372 bp, Gossypium hirsutum
  Clone ID: LIB3197-027-Q1-M1-H1
attgcttttactttcttgatgattttaacatacagcgagtcttatcacagaggggggtggttattctattttcactttataaagtgaataattttaccggctttatggcctaaggttaatggagtcaccaccaccctggtgggccacttccattactgaacctcgccggtcaagacgccaccgatgctttcatagcttatcatcccggcatagcttggcaatatctcgacaagttcttcactggttattaccttgaaggttacttagtctctgatatatccaaagattatatacagctagctgttgaattgttaaagatggttctttttgacaagaattgctttggtcgctgtattctccattttcaactta

SEQ ID NO: 50774 - DNA, 426 bp, Gossypium hirsutum
  Clone ID: LIB3197-027-Q1-M1-H10
gattgagttagtttacccttaaatgaaataaacagtagggagtgggatttttttgttttcttatgttcttatccgctttcccgtcgccgtaatcagacacgcaattcaaggcattatctacacgcgatcaacgatgatgacgaaacccatttaccaaaaccagatccatgttgaaaatattttttttatataaccatttccaaaattgcaataaaatttattcatcttctcttttgaatctttccctttctttccttttcctgtaaaaatggagggttcctcgtctgacaagctgatcgttgtgacccgtgaacctgatgggatcgctattgttaccatcaatcgacccaaatctctcaactccttgacccgacccatgatggtggacttggccaaggctttcaaggctcttgcgaaggacaactc

SEQ ID NO: 50775 - DNA, 440 bp, Gossypium hirsutum
  Clone ID: LIB3197-027-Q1-M1-H11
tcggattgagttattttacccttaaggggaataagcagtatggagggggatttttttgttttcttatgttcttatccgatttcccgtcgccgtaatcagacacgcaattcaaggcattatctacacgcgatcaacgatgatgacgaatcccatttaccaaaaccagatccatgttgaaaatattttttttatataaccatttccaaaattgcactaaaatgtattcatcttctcttttgaatctttccattactttccttttcctgtaaaaatggagggttcctcgtttgacatgctgatcgttgttacccgtgaacctgatgggatcactattgttaccatcaatagacccaaatgtctcaactccttgacccgacccatgatggtggacttctcccaggctttcaatgctcttgcgatggacatttcgacgcgaatca

SEQ ID NO: 50776 - DNA, 445 bp, Gossypium hirsutum
  unsure (1)..(445): unsure at all n locations; Clone ID: LIB3197-027-Q1-M1-H12
caaatggtttagacaaaatagcagacgggaggcgctccctggtacttgttgtctttgttggaggggtaacatttgcagaaattgctgctctcagatttctcagtgcccaggaaggaatggcatatgatctgattattgggacgacaaaaatggtcaatggtcattcattggttgaaacattgtttgagacaatcggttaactcgttcgaatgtgtgttggcttttaggaggtttttgtttcccaatatttctctccaacaacagaaaatcataattatggcgtactgggcagtgaggctgaaaatgtgaagtgtttggtcagacgaaaattgttttgcactgccagtgtatctatccatctatattgnatttatttgattttacagccaggaccatttaatggagatgattgtttttgtgtcatgagaatgatttggggatagta

SEQ ID NO: 50777 - DNA, 457 bp, Gossypium hirsutum
  Clone ID: LIB3197-027-Q1-M1-H2
acgcccccatttattttatttttcaaacaaattttcccttcaattttcgtataatttcctaggaaaagaaatatgagagagtgcatttcagttcacatcggtcaggccggtattcaggtcggaaatgcttgctgggaactttactgtctcgagcatggcattcagcctgatggccaaatgccaagtgataagactgttggtggaggagacgatgctttcaacacctttttcagcgaaactggtgccgggaagcacgtccctcgcgccatctttgttgatctgggagcctactgttatcgatgaagtgaggactggtacgtaccgccagttattccaccctgagcaactcatcagtggcaaagaagatgctgccaacaatttcgctcgtggccattatacaattggcaaagagattgttgatctctgcttggatcgtatccgaaagcttgctgataac

SEQ ID NO: 50778 - DNA, 453 bp, Gossypium hirsutum
  Clone ID: LIB3197-027-Q1-M1-H3
acgcccccatttattttatttttcaaacaaattttccgttcaattttcgtataatttcctaggaaaagaaatatgagagagtgcatttcagttcacatcggtcaggccggtattcaggtcggaaatgcttgctgggaactttactgtctcgagcatggcattcagcctgatggccaaatgccaagtgataagactgttggtggaggagacgatgctttcaacacctttttcagcgaaactggtgccgggaagcacgtccctcgcgccatctttgttgatctggagcctactgttatcgatgaagtgaggactggtacgtaccgccagttattccaccctgagcaactcatcagtggcaaagaagatgctgccaacaatttcgctcgtggccattatacaattggcaaagagattggtgatctctgctttgatcgtatccgaaagcttgctgat

SEQ ID NO: 50779 - DNA, 415 bp, Gossypium hirsutum
  unsure (1)..(415): unsure at all n locations; Clone ID: LIB3197-027-Q1-M1-H4
attttcaatcgtcttctctttcaatcttcttgatttcgaagcaacctctcgattccgaatatctcccagaagataatcttctctttacagcttctttttctatttcagttttgatttctttgttcgtgatttctcgtaaatttttatttggtgtaattagggtaaggtttcatcaattaattggatctatttcaataaatatattggcatctgtttgtaaagatcttatttttnttaggtttcaagatctaaaattccagtttgttttgtccagtcgattgatttgccaactttggtattgttgattttagggtttcatgggttagttctgatctggcttaagaattttatgaactttatttgagtttttttatttagggtctgatttggttagtgcttcatggttgaataaact

SEQ ID NO: 50780 - DNA, 407 bp, Gossypium hirsutum
  Clone ID: LIB3197-027-Q1-M1-H5
cccacgcgtccgagaaaattctatgtcgagcgagagagttcccgttgagttatccaagggcgttaacggccttgaaaaaatcatcctccgcgagactcgaggcagctctgccgaggtgtatttgtatggaggacacgtgacatcttggaagaatgagcatggagaggagttgcttttcgtcagtagtaaggcattgttcaagcctccaaaagcaattcgtggaggaattcctatatgttttccccaattttcaaatcatggtcctcttgagccgcatgggtttgccagaaatagactttggagcattgacactgaccctcctgcttttccgacaaactcatccaacaaagcttacattgatttgatccttaagccttctgaagaagatatgaagatttggcctcaca

SEQ ID NO: 50781 - DNA, 437 bp, Gossypium hirsutum
  Clone ID: LIB3197-027-Q1-M1-H6
ccgcttacaagaaattcctccgccaccctatttatcaaattccaaaacccgcgatattcggatttcaaaggctcgcgccaatgagctttcatggcgtccaaatcgtctaagaagaagcctaacagcaagcggtcaagctccaagcccgcctcctccccgatggcatctccgaagcattttcatctcaaaagattcttcattttaatttcgattatgttgcctgtttgtgtaattgttgttttgggagtttcgtcaaacacgtcgtttaagatatcgtcggatcattactccgttaagatttacggatttgaattagtcaatgaattcccccacgatccccgtgctttcactcagggccttgtttatgctggaaatgaatccttatacgagtcaactggactttacaagcagtcaactgttcgcagagtagctattca

SEQ ID NO: 50782 - DNA, 414 bp, Gossypium hirsutum
  Clone ID: LIB3197-027-Q1-M1-H7
ggagcatcaatggcggattcaaaggggtacatttccaaaacagagcttgaaacccacaaaaaaccagatgatctttggatctcaatccaaggcaagatctatgatgtaactcaatggagtcaccaccaccctggtgggccacttccattactgaacctcgccggtcaagacgccaccgatgctttcatagcttatcatcccggcatagcttggcaatatctcgacaagttcttcactggttattaccttgaaggttacttagtctctgatatatccaaagattatagaaagctagctgttgagttctcaaagatgggtctttttgacaagaaaggacatgggacatgtattttacttaccatcatagcattgctgtttttcatctgtgtttaatggggtttaatgtgtgacaaa

SEQ ID NO: 50783 - DNA, 382 bp, Gossypium hirsutum
  unsure (1)..(382): unsure at all n locations; Clone ID: LIB3197-027-Q1-M1-H8
cggacgcgtgggaaaaagacaagcgtttcagtgggtctgtgaagcttccacatattcctcgccccaaaaatgaagatttgcatgcttggagatgctcaacatgttgaagaggcagagaagataggtttggattatatggatgtggaagcattgaagaaactaaacaagaataagaagttggtgaagaagcttgccaagaagtatcatgcctttttggcttctgaatctgtcatcaagcaaatccctcgtcttttgggtcctggtctcaacaaagcaggtaaattcccaacccttgtcactcaccaggaatcactagagtcgaaggtgaatgagacaaaggcaatnggtaagttccagctgaaaaaggttctatgcatgggag

SEQ ID NO: 50784 - DNA, 400 bp, Gossypium hirsutum
  Clone ID: LIB3197-027-Q1-M1-H9
agtttgcattactctttttggggttccagaaaaggaataacgtttaaagatgctacagttgttgttcacggtgatattcgcagagatggcggtgatcatcgtactatgcttcaagacaccgttaaggaagctggtgttaatggttctggatcgggccaagaggggacgaggtccggtcatagtgaagacggtgggcggaacagtatccgttgtgatgttgtcgtacatattcagcatgatgatgctcaagaaacgctggatcgttgatggaaacgcttctctaacggacgagattctcatggccaaaaacctcctcgaaactactctcatggggggattgctattcctatctctaattatagacaaattacaccattatattaaagaactccgtataaga

SEQ ID NO: 50785 - DNA, 444 bp, Gossypium hirsutum
  Clone ID: LIB3197-028-Q1-M1-A10
gtttcagatgaggattctagaaaggtctggtcttggtgaagagacttgtttacctcctgctattcattatattcctccaactccaaccatggaggctgctagaggcgaggctgagattgttatcttctcagctatggattctttgttcaagaaaacggggttaaaacctaaagacattgatattcttattgtcaactgcagtctgttttctcctacgccatctttgtctgctatggtgatcaacaaatataagctgaggagtaatataaagagctttaatctttcaggaatggggtgcagtgcggggcttatctccattgatttagctcgagatcttctccaagtacaccctaattctaatgcagttgttgtcagcactgagatcatcactccaaactactaccaaggaaaagaaagagccatgctccttctcaactgtctttt

SEQ ID NO: 50786 - DNA, 274 bp, Gossypium hirsutum
  Clone ID: LIB3197-028-Q1-M1-A11
gaaggttcgagatacacatggggcgcgcgcctgggagaggataaaaatggttttgggaccaaatggaccctgttgtgagagcacggcaccaccaacccattggcgatactagagcctgttggtgagctttgaaagtacaacctttttatgcagccgggggaaatatttgggggaaatgggcgctctgtgtctttaactttgaaatacactcaactcttgggtggcgtttaccaaaaatgatctggggtgataaacaaacatctcccttttccgc

SEQ ID NO: 50787 - DNA, 430 bp, Gossypium hirsutum
  Clone ID: LIB3197-028-Q1-M1-A12
gcaccttatcagccttcagttgagttcactccttatcctttgctttcatagctgcgttccattttccctaacaaacctgcatcagatccgatcagatttaactcagatccatctgtatcgggtcttctaaattccagatctttacttttctcgagtaaaggaagaaagaggacgggcgagatgagagagattattagcgtccacattggccaagctgggattcaggttgggaattcatgctgggagctttactgtcttgaacatgaaatgcaccctgatggaacaatgccgagcgacacctctatgggcgtggcacacgatgctttcaacactttcttcagcgaaacgggttcgggaaagcatgtgcctacagctgcctttgttgatctggaacccactgttatcgatgaggtccggaccggcccttatc

SEQ ID NO: 50788 - DNA, 56 bp, Gossypium hirsutum
  Clone ID: LIB3197-028-Q1-M1-A3
gctacacgtacatccggttacatgtgaacgggtcttgggcatgttgtaggctgttc

SEQ ID NO: 50789 - DNA, 432 bp, Gossypium hirsutum
  unsure (1)..(432): unsure at all n locations; Clone ID: LIB3197-028-Q1-M1-A4
ataccattaaagggtacagagattgagagaaaactacttgtgggacttcacccccccccaaaaaaaactgttttttctctgtctctgcaataaactggaaggagcagacacagagacagggagagagagagagagagagagagagagagagagagagagagagaggtgtgggggagacagtatggctaagttaatcaaaggataagatttgatccatctctcttatgttttcctttttctttgtataaagtccagaagaagcagattcaaggatattgagaagaagtttctaaagattttgttaagctagctatgggaactcttgcaatcgatacggagtgtgtggattctgatatataccgtgctttgggattcaaagaattgggtaaaggagtgttggaactccacggattntatcacttctttcttcgc

SEQ ID NO: 50790 - DNA, 457 bp, Gossypium hirsutum
  Clone ID: LIB3197-028-Q1-M1-A5
acggccacgcgtccgagaggctggaattgcaaatgggaccaaacccacttgatagcgaaaccacaacacgacccgccaattgtcaatactacatccttagcagcaactttgaaagtcgtacctttttctccatcccgaggaaacaagcggcggcgctgcccgctctccgcctctaacatctttatacgtctaactattgttttccgttaaccgaatatgacctgtcgtcctcaacacccatatgtgtaaaaagcactctcattggtcggtgtgtatgtaatgaaacaaaagctgtcacattttttgtcctgttttcttcccccttccatctttatttcgctgtagaaaaaaaaaatctttcaaaacttttttcttttttgtccctcaaagtatctctcagctgccaagtacttgcatttcagcttcaattgagaatttccatcaataatcctttaat

SEQ ID NO: 50791 - DNA, 435 bp, Gossypium hirsutum
  Clone ID: LIB3197-028-Q1-M1-A6
cccacgcgtccgctcaagctgatttattacgtgttaatataggttgagatggcttcgaccactctaatctgcgatacccagccatggaaggacttgaaggctcatactgaggatatcaagaaaactcatcttcgtgatttgatgaacgacaaagaacgatgcgaatcgatgatggttgagtttgatggaatgtttttggactactcaaggcattgcgccactcttgagaccatggataagctctataaattagcagaggctgcttctctcaaacaacaaattaaccgaatgtatagtggcgagcatataaatagcacagaaaataggtcagtgcttcatgtagctcttcgagcaccaagggatgctgttataaacagtgatggaaagaatgtggtgccagatgtttggaatgttttggataagatcaaggatttt

SEQ ID NO: 50792 - DNA, 246 bp, Gossypium hirsutum
  Clone ID: LIB3197-028-Q1-M1-A7
gaaaatggaaagcagagacagaagaccaagaaacggaagaaaataaatataagaaaagaaaaagaaaagaagggaagaatggagggagaggtggaatcacatgcgcattagttcactgtcgttctcctaagtcctcgtttgcttgttctaattcttgttaatcatcatcatattcctttttgctcgtcatggctgaaaataaagaaatgtcggccccctgttgttgacgtcaatgatcccgggtac

SEQ ID NO: 50793 - DNA, 286 bp, Gossypium hirsutum
  Clone ID: LIB3197-028-Q1-M1-A8
gagaaagaaaaaaaagggttgtttgagattttggttttgaaaaaaaaaaaaacagatatgagggaggtgattagtatacatattggtcaagctggaattcaggtcggaaattcctgttgggagctttattgtcttgaacatggaattcaacccgatgggatgatgcctagtgacaccacggtaggtgcttgccacgatgcttttaataccttctttagcgagactgggtcgggcaagcatgtaccaagggctatatttgttgatctagagcccactgtcattgatg

SEQ ID NO: 50794 - DNA, 418 bp, Gossypium hirsutum
  Clone ID: LIB3197-028-Q1-M1-A9
gctcaacccttcttcttcggaaaagaaggaaattagtaagaaggctaatgcgttaactgagagaaaacagaagcgaaagaagtgccaatccgagaccataattaaacctgcagtgtcagattgtggggagaagaaaataagctctatgaaaaataaggacgtaggtgatggaagatgcatagctgaaattaagtctccagctatgatttgtgcagaggaaattcaatcaaacctagaacctgaatttcccagttttgcaaaatctttggttaaatcacatgttggaagctgtttttggatggggcttccggggatgttctgtaaaatacatttacctaggaaagatactacaatcactttggaagacgagagtgggaaccaatttcatgtaaaatactacgctgataaaacgggattg

SEQ ID NO: 50795 - DNA, 354 bp, Gossypium hirsutum
  unsure (1)..(354): unsure at all n locations; Clone ID: LIB3197-028-Q1-M1-B1
attagattgaactttttttcctgttgatttagaagttaaattcagtttgaattgaatcttaattaaatggaaacagggaaaaaaattagtgagttcttaagttntattgagtgcttaaatagagagttttctttctttattcgtttggacttatatgatattatgaatgctgcgataatgtccttatataataaggattntattatgtttatttacttagagagttctttcattcaactgtagtcttaaatgtcaatgcggtttgaatggttgctattcatacatttgatcggtaaacaagaaagattcgaaaatggattgaaatggggaaaatggtaaattctttttttaaaa

SEQ ID NO: 50796 - DNA, 423 bp, Gossypium hirsutum
  Clone ID: LIB3197-028-Q1-M1-B10
cggacgcgtgggtgaaaatggaggtttacaggagaaggctgatgtttctagtgtttgcatttgcattagtaagtatagggtatgcacaagagtcgaactcgaccactctggttccagcaatactgacttttggtgactcagtggtagatgtgggcaataatgattatctccccaccatcttcagggctaattaccctccttatgggagggacttcaccaaccaaaagcctaccgggaggttttgtaatggaaagttggccactgacatcactgctgaaactctggggtttactacttatccaccagcatatttaagccctgaagcatcagggaacaaccttcttattggagccaattttgcttctgctggatctggctatgacgacagagctgcctctttgaatcatgctatcacgttgagtc

SEQ ID NO: 50797 - DNA, 377 bp, Gossypium hirsutum
  Clone ID: LIB3197-028-Q1-M1-B11
cccacgcgtccgcttccaaatcatacgctcctcatatcatccgccaacattctaggaatcatcaaaaccaaacctcccccacaccataacacaaaacaccgtttcccttctttcccattctgttatggccacggtggcgcgtgtaattcgctgtgaactactgtccactaaacctggagcgaacactaggagggaacagggtgatcaggttcaggttcagagagtgaaagcgggtgaacccgagaatggaaagatagtgttgcagccgaggttatgtacgttaaggtcgtacggttcggatcgagtaggggtgatgaagaccagaagggaagaaaacgatgacgtttcaccctttttcgagactttatcggagtata

SEQ ID NO: 50798 - DNA, 421 bp, Gossypium hirsutum
  Clone ID: LIB3197-028-Q1-M1-B2
attggattgaacataacatcctgttgatatagacttgggtttcagatcaaatggaatattacttaaatggaacacagggaaaaaaattagcgagttcttaaattttattgagggcttaaatagagagttttctttctttatgcagctggactgacatgatcttatgaatgatgcgataagagtgctgatataatgacagatctgatgagtgtaataaaagatactgagaccattattttaactgaaattggaaaaggaaaacaggttcgaaaggttgcgtttgagaatttggaacgtactgcaaacaataaagttaggattggaacttaccaacaacttttctaccttaaacaggttatttttggcaaagaagatgctggcaataattttgccaaaggccgtaatacaattgggaaggaaa

SEQ ID NO: 50799 - DNA, 298 bp, Gossypium hirsutum
  Clone ID: LIB3197-028-Q1-M1-B6
cgggctcgtgggtttagttggatcttgaaaatgctggcttggctcatgtgtcgacgatgactcaacatccgataagctatccgttactcttgtaaggcctcttgatattgtgacactgccctgaactataattttgataccccagataataaacccgaccttgcatgggaattttcggaggcgaacaaacatacggtcacggagatagtgaatcatgatccatacaactacaagcatgatgctgctattactgagatagatgtggctcagccaccagatgtacgatggcttacaatgt

SEQ ID NO: 50800 - DNA, 352 bp, Gossypium hirsutum
  Clone ID: LIB3197-028-Q1-M1-B7
cgaccactccacacgtgactggcactcgttcgcgtgtcgatgtagaacttaattttacctggctcggaatcttatttaattggatactggaaaaaaaatctagcgcagacttaagtttcagtgatcagcataaagaaagagagggaggaatatattcggaagcactcatatgatatgatgaatgctgcgataatgtccgtagataataaggatgggactatgtttattgacatagagagaacttggattcaactgaaggcacacaagtcaatgcggggtgaatgggtgctatggatacatccgatcggaaaacaggaaaaggcgcaatggatgaaacgtgaaaaagaaaact

SEQ ID NO: 50801 - DNA, 394 bp, Gossypium hirsutum
  unsure (1)..(394): unsure at all n locations; Clone ID: LIB3197-028-Q1-M1-B8
ccccctagggtttatctagggtttcctattggtaccgttcctctctttgtattccgccaatggcgaagccgacgagaggccgccgttctccttctgtctccggttccggttcctcttctcgttctcgttcacggtctangtctcgctcccgctcttattccggttcagactccaagtccagttctcgctctcgctcagtgtcgcgctccagatctgcttccccgtctagctctcgttctcgctccagatctttatcctcttctccttctcgtaacggtagctttcgaaatcgcagtcctccttaacgtcgaaaggcgactggtgcatttaagggaaggcggtccccttcttcggaatctaaaaaattattttcaacttcgaaggaaactttccc

SEQ ID NO: 50802 - DNA, 423 bp, Gossypium hirsutum
  Clone ID: LIB3197-028-Q1-M1-B9
aaaaagccaagtgccgcaaacagtgaaacacctgcccatatacagtgaggatcaaatattcattcattatcaaaacaaattacaactggattaacatttataaagaatctaaactaagtgattatcctgaatcatggtacatcaacagagcaccaaagttactcaacagttaactacaaaaaatctactaaaaacaccaaaaagacttacctgcaaagaacattttagatagaatgactaaaactgggatatatttccaccacaatatcagccacattgcaatctgaaatcaagtacacccagcctcatgttaaaaaaactttattaacatcttgtcaaaagcaatgatcccaaaggaaatcagtatgccacaacacttaccaaagtgacaaaatcacttaacttggttgattagaaaaaata

SEQ ID NO: 50803 - DNA, 105 bp, Gossypium hirsutum
  Clone ID: LIB3197-028-Q1-M1-C1
attccccttcggactttactttgttgcgcgtgcaagagaacaaagttggggcggaataacaaactgaacacatcgacatgcaaattaattaaaatttcaaatgac

SEQ ID NO: 50804 - DNA, 442 bp, Gossypium hirsutum
  Clone ID: LIB3197-028-Q1-M1-C10
ctttaccggaaacggtattggattccggcgagtcgaggccggagttagggtttctgtttgaagcttcggatgatgaactgggtttgccaccgagtttaccggcggttgaggtggagcagagatttgagaccgcctttgatgtggatgaaggtggagggtcaggtggcgttggatttggggaaatgatggggaatgagttcccgattccgatctacgaaccgtttgaattcggaatcggcgttgactcagataccaataacagtttccatagtaataataccggcgatttcgtggcgttaggaggtttgtttgaaccggcggctgatatttcggagctgacgtggcggcctgaatcactttccgccttgtagtgaaaattaaataaataaaaaacaaccgaaacggttcggtttggctccgtatacatcacgtgggcatattc

SEQ ID NO: 50805 - DNA, 435 bp, Gossypium hirsutum
  Clone ID: LIB3197-028-Q1-M1-C12
cggacgcgtgggttttattttcactcacttcacctgagattttgttttcttttgtttttcagtaatggggaagattaagatcggaattaacggatttggaaggatcgggcgtttggttgcgagagttgctctccaaagcgaagatgttgagcttgttgctgttaatgatcctttcatcaccactgattacatgacctatatgtttaagtacgacagtgttcacggtcaatggaagcaccatgagcttaaagtgaaggactcaaagactctcctctttggtgaaaagcctgtcactgtttttggcatcaaaaaccctgaggaaattccatggggtgaggctggtgctgaatatgttgttgagtctactggtgtcttcactgacaaggacaaagctgctgctcacttgaagggtggtgcaaaaaaggtgattatttc

SEQ ID NO: 50806 - DNA, 345 bp, Gossypium hirsutum
  Clone ID: LIB3197-028-Q1-M1-C2
atgcgcagctggccgcggcgctccgctttcccagcgcccgcagctgaatcgcagtccgcagcccgcagcccggcgcggactcccatcgccgcagtcgccctccggcgccatgtcgcaaaacggagcgcccgggatgcaggaggagagcctgcagggctcctgggtggaattgcactttagcaataatggaaacggcagcagcgttccagcctcggtttctatttataatggtgacatggaaaaaatactgctggacgcacagcatgagtctggacggagtagctcccagagttctcactgtgacagcccacctcgctcacagacaccacaagatactaacagagc

SEQ ID NO: 50807 - DNA, 332 bp, Gossypium hirsutum
  Clone ID: LIB3197-028-Q1-M1-C3
ctcactccttctgatatcaaagcttcaaaatggcatttgtcaaggctcaaaaaaccaaagcttactttaagcggtttaaggctccatacaaaagaaggagagagggaaagactgactaccgggctaggattcggctaatcaatcacgacaagaataagtccaacactctgaaataccgattcgttgtccgatttagcaacaaagatgtcaccgcacaaatagattgtgctaatattgctggtgatatggatgttgcttctgcttactcacatgagcttccacgatatgggcttgaagtggatcttacaaactatgccgcatcttattgcact

SEQ ID NO: 50808 - DNA, 437 bp, Gossypium hirsutum
  unsure (1)..(437): unsure at all n locations; Clone ID: LIB3197-028-Q1-M1-C5
ttcctttgttcctcatcctctgatccgtctcttcccgcattcgtcccgccggatttaacaagttttcaaacgaaaaatgagggaaatccttcacgtacaaggcgggcaatgcgggaaccagatcggatccaagttctgggaagtggtttgcgacgagcacggcattgaccctaccggacgctataccggaaactccagtctacaattggagcgcgttaacgtttactacaatgaggcttcttgtggaaggtttgtcccacgcgccgtgctcatagatcttgagcccgggaccatggatagtgtgagaaccgggccttatggtcagatctttangcccgataactttgtcttcggccaatctggaactggtaataattgggctaaggggcattatactgaaggagccgaacttattgattctgttcttgatgttgtca

SEQ ID NO: 50809 - DNA, 286 bp, Gossypium hirsutum
  Clone ID: LIB3197-028-Q1-M1-C7
atataatggcagccgaatgtgctcgtaatgctttgttgcagagggttgtggataacaaagagaatgcagagaaattcaagtcagacttgatgaaaattgcaatgaccactttgagctccaaaattctctctcatgataaggagcattttgcacaactagctgtggatgctgttatgaggttaaaggggagcacaaatttagagggcatgcaaattatcaagaaccctggacgatctttgaaggattcctttttaaatgaaaggaattattttttgacaaaaaaata

SEQ ID NO: 50810 - DNA, 309 bp, Gossypium hirsutum
  Clone ID: LIB3197-028-Q1-M1-C8
atcaagccaagctgaaaccagcactgccgaagaaacgctactcttcactacagccgtcaacaccatgcggtggccggcggtgaaaagtggggggctgggggtggttgcgatgacatacgtggcgggagactatttatgcatcctatccccaacgtggcacgagcgtcttcaacccgtactctggtctttactcgccctcgtcgccgtcacgcgcgtacccttttaccgtgactggagcgccgagtttcgagctcccatctctttacttgcttcgatgatatttatgctctcagctcttctttttgaaac

SEQ ID NO: 50811 - DNA, 206 bp, Gossypium hirsutum
  Clone ID: LIB3197-028-Q1-M1-D1
atgaacaactcaaccttctctgcacagtgggtccaacatcctttgaagcatgagtgtttaccaggagaagcagacctttaccccaccacctcaccttcaacagcagcaggtgaaacaacccagccagccttcaccttaggaaccatttgttcccataaccaaggagccatgccacccaaagggttcacaacctggaaacacaaaga

SEQ ID NO: 50812 - DNA, 382 bp, Gossypium hirsutum
  Clone ID: LIB3197-028-Q1-M1-D10
aaattcgatcagctctagtagtttaataaggtatataaagaagaaagatctccttgaattttatttttgaagtaagaaggtgaatatgggtgcttcggaggagaacagtgccttgttcccaatctttgggttcactataatggctctgccattagtgccatacactataggtaagatattaaacacattctcgaagaaggcaatgactatccattgccagtgttctgggtgttctcggtctgggaagtataggaaatcaattttcaaacggatctcgaacttctcaacttgtagtaatctgacccttgtgcttctctggattgtcatggcggtgctgatatactatatcaagccttacaagtcatgaggttaaagtatttga

SEQ ID NO: 50813 - DNA, 416 bp, Gossypium hirsutum
  Clone ID: LIB3197-028-Q1-M1-D11
ataacattcgtctctcagatcctttcctcttagatcatcaaatccattcctttttttcaccaaaacatgagggaaatcataagcattcatataggtcaagctggtattcaagtcggtaactcatgttgggagctttactgccttgaacatgaaatccaacccgatggaatgatgcccagtgacacctctgtaggtgtagcaaatgatgctttcaacactttctttagtgaaactggttcagggaaacatgttcctagagctgtgtttgtggatctggaacctactgtgatcgatgaagttaggactgggacttaccgacaacttttccaccctgaacagcttatttctggcaaagaagatgctgccaataactttgccagaggccattatacaattgggaaggaaatttgggatct

SEQ ID NO: 50814 - DNA, 424 bp, Gossypium hirsutum
  Clone ID: LIB3197-028-Q1-M1-D12
ctcacggtaaaaagatctcccttcccctctctttctctccggcggcgatctcaaatcaccggtaaatcgcaccgtaacgcccgattactcgtcacctctgtgatctcctctgacacctcgtggtttcagtttattctaactcgtcgccatcatgaatcccgaatatgattatctgtttaagcttttgcttattggtgattctggtgttgggaaatcatgtctacttttgaggtttgctgatgattcatatctggatagctacatcagtaccattggtgttgactttaaaatccgtactgtggaacaggatggaaaaaccatcaaactccaaatttgggacactgctggccaagaacgctttaggacaatcactagtagctattatcgtggggctcacggtatcatagttgtttatgacgtgaca

SEQ ID NO: 50815 - DNA, 240 bp, Gossypium hirsutum
  Clone ID: LIB3197-028-Q1-M1-D2
caaaaaacatctttctgttcaattcaatcctcctttttctattcaaccataatgtcttgcttcattagcaaatacgccgatgagttggctaaaaacgctgcttacattggcacccctggaaagggtatccttgctgctgatgaatccaccggcaccatcggcaagcgtctttcaagcattaatgtagtaaatattgaagaaaacaggcgtgctctccgtgagctcctcttcactgctcca

SEQ ID NO: 50816 - DNA, 447 bp, Gossypium hirsutum
  Clone ID: LIB3197-028-Q1-M1-D4
ttcaattcctgcttctattctcgttggtatcataaaagaatctcattcccccggtttcaagaaatggcagagaaatcgtgcgttaagcgccttcagaaagaatacagagcactttgtaaggaaccagtttctcatgttgttgctcgtccatccccaagtgacattcttgaatggcattatgtgctggaagggagtgaaggaacaccttttgcaggtggatattactatggaaagatcaagttccctcctgagtatccctacaaacctcctggaatcaccatgatcacccccaatggacggtttatgacacagaagaaaatatgcttgtccatgagtgattttcatccagaaagttggaatccaatgtggtctgtatcaagcatactcacagggcttctatctttcatgatggataacagtcctaccactggcagtgtaaacactaca

SEQ ID NO: 50817 - DNA, 446 bp, Gossypium hirsutum
  Clone ID: LIB3197-028-Q1-M1-D5
cggacgcgtgggtcaagttatttcccattttttgggcgttctttatgccaactgataatcaaatgaaagacatgaaaccgaattccataatgggatcgtcagtcaccgacggcgagatcgtgtgcgtaacaggcggctctgggttcattggttcatggctcatcaagctgctcttggaacgcggttatgtcgtccgagccactgtgcgcgaccctggcaactcgaagaaggtgaagcatttactagagctacctaaagcagagacgcacttgactctttggaaagcagatttagctgaagagggaagctttgatgatgcaattcaagcttgtacgggtgtgttccatgtggccacgcctatggacttcgagtccgaggaccctgagaatgaagtcataaaaccaacaatcaatggagtgctaagcatcatgaaagcttgcgccaaa

SEQ ID NO: 50818 - DNA, 420 bp, Gossypium hirsutum
  Clone ID: LIB3197-028-Q1-M1-D6
ctctgtttgccattcgccttaatcatcttcctctttgtttaaaacttcttcctatttaatttctgactaaacttgcgctgaattccatggctactgcagaggttgtaacagctcaaactgcaatccatgaggagaaacctgaagaagtggtcaaggttgaagaaattgcaacagaagaggtagtggctgttgctcctgcaacagaacctgttgctgaagaaccaaaggaagcagtgcctgaagcagcatccgaagaaccccaggctccagaaactgaagccacagttgaaactgaatcaaaggaggtggttgaagagcccaaggctgtgactgaggagccagaagttgagaaaaaagaagaagagactcctgaggaaacagtagcagagccagttgcggaggagtccaaggagactactg

SEQ ID NO: 50819 - DNA, 367 bp, Gossypium hirsutum
  Clone ID: LIB3197-028-Q1-M1-D7
aacatttaaaatgaggttttccatgaaattgataattttctgatgtgcttatctctattcctgcagaaacatgggttccaagagctatccaatgatgactatttttcaaagaataatgagtttgctacatggctgaaagaagagaaacgtgtgtttttctctgatctttcatccgagtctgctcgggatttatttgcagactttgttaaagactggaataaccagaaactcggatctcaatactatgaacgccttgcaagtgggccacggactgcacataactgggaaaatcaacttgtaggaaggagaaaaaacctttttccacttggacccctactttttttttcttggttggccctcctttatt

SEQ ID NO: 50820 - DNA, 395 bp, Gossypium hirsutum
  Clone ID: LIB3197-028-Q1-M1-D8
ctttgctgttgaagtagtaatatctatagcatacagagatggagaggcaaagaagcaagcaggtttgtttgttgatgtgggttttggttgctgcctttttctcccacaatagggtcattgcagtgacctccactggccttggtgagcagaaaaactactatccagctcctgaccctcatgctggaactcccccttcaggttcacatggcacaccaccatcttcaggaggtggatcaccttcctctcatggaaccccgtcacatggaggtgggtaccaccctttaacaacaccattaacgccttggggtggaaattggggaactcccccacatgacccttcaactgcatcaacaccatcacacactccttctcatggtactgcaccatcatctgga

SEQ ID NO: 50821 - DNA, 369 bp, Gossypium hirsutum
  Clone ID: LIB3197-028-Q1-M1-D9
tttttctcttcttcccagcagaaataataatggcactaatcatggagtccaaacatgggagttggagactctcattaatgttgcttctggttatgcttgggttggcaaaagctgatatcaatcaagacaaaacagaatgtagtaatgagctagtagggctggctccatgtctcccttatgttggtggagacgcaaaaacccctaccatagattgttgcagtgggctgaaacaggtgctggataagagccggaaatgcctgtgtgtactgcttaaagatagagatgaccccagccttggcctcaacatcaacgctactctcgcggcaacacttgctaccacttgtcgtgcccctgtcaacatgaccgact

SEQ ID NO: 50822 - DNA, 370 bp, Gossypium hirsutum
  Clone ID: LIB3197-028-Q1-M1-E1
gggaggtttcagaatgggaaatttcatgggaggatcttcaaattggtgaacgcattggtattggatcatatggtgaggtctatcgagcagattggaatggcacagaggttgctgtgaagaagtttctagatcaagacttctctggtgatgcattggttcaatttaaatgtgaagttgaaatcatgttaaggttgagacatccaaatgttgttcttttcatgggagctgttactcactccccgcatttctctatactcacagagtttctccccaggggaagtatgtataagctactgcatagacccaatcaacaacttgatgagaagagacgaatgcgaatggctcttgatgtggctaaaggaatgaatta

SEQ ID NO: 50823 - DNA, 443 bp, Gossypium hirsutum
  Clone ID: LIB3197-028-Q1-M1-E10
aatttcatagctatgactgttatgggccctgcgccctatcgatcaacaagaagatgaggaaatgctcgtcccacagtctgatttgaccgacaatcaccagcccatggaagttgtagcgcaacccgaagctgcaaatactgtggaaaatcaaccagttgaggatcctccttcatcaagattcacttggaggattgaaaacttctctaggttaaacgctaagaagcattattctgaagtcttcgttgtcggtggttataaatggcgaatactgctatttccaaagggaaacaatgtggatcatttgtctatgtatttggatgttgctgactcagcaagcttaccctatgggtggagtagatatgcccagttcagtttggcagtagttaatcaaattcataataaatattctatcagaaaagacacacagcaccagttcaatgcac

SEQ ID NO: 50824 - DNA, 439 bp, Gossypium hirsutum
  Clone ID: LIB3197-028-Q1-M1-E11
cattttcacattttatctatttactctctacctaagcttatttgtgtgcctatgcaatggcagttgatcctcaaaactcccccatggaagggttcccggccacacctaagatccgggaagtgaggcctgagtccggttttgagaatttcgggttttgcactgacccctgtcgtgtcccgggcggtgaacccaactcgggaataagaagagtgagtttgagggctgagattgacacttcacctcctttcggatcggttaaggaggctgtgacccggtttggtggcaacggacattgggtgccattgaacaagtttggagaatatcatggaattgaagagtttgatttaaagaaagtggaggaacaagcagcggaattggagaaagatctgattgtgaaagaattagagacccttgatgtgcttgaagaactggggactac

SEQ ID NO: 50825 - DNA, 414 bp, Gossypium hirsutum
  Clone ID: LIB3197-028-Q1-M1-E12
aacatatagaaggacctaccactttgggcaaaatacatagatactgagcatagtgaggtctactggccctcttattaatcataaatgatgagaaggtggctgtctttgattgttgaaattgatgcattcatacgtaaagacataccgtattgcttattccaaattctgactgggaaagggctcactaacctatatcagtgacaatttagcttcttgagcttgaataacattgtatccatctcatttgggaggcagggcatatctggggttcttacacgacttattgataacataattggtaaagatagtgcctcccatagtgggggtcctttccttcattcaaagcttcttctgcgacggtgatgttgaaatgagagcatctatctgtgcgctatgagctgaagtatgaaacat

SEQ ID NO: 50826 - DNA, 342 bp, Gossypium hirsutum
  Clone ID: LIB3197-028-Q1-M1-E2
attgccctgtattcttcctcacacaatcagccgatctctccttttttgtttgaaacaaaacggaatctacattgggtggcacatgttttgcgagagagtaaagaggagagcattggcaaatttcatttgggtctcttagttttccatgttataaaaaaaaaaagaaaaaaaacgccattgccgacacccgtgttgttggtttcttattttgtttttttgatctactattgaatggaatagagggaggcgtttgttcaaatttaaccgaagctgatgatcccgatgtctgttcaagtgtttaagagataacatcacggtccaactgaggatgatattgggagc

SEQ ID NO: 50827 - DNA, 109 bp, Gossypium hirsutum
  Clone ID: LIB3197-028-Q1-M1-E3
cccacgcgtccgattcgaatgcttattctatatcttcttctttctcaatgagcaatatcctgatgatttcaaataaatttcaaatgccaattgcacgattatttatcat

SEQ ID NO: 50828 - DNA, 456 bp, Gossypium hirsutum
  Clone ID: LIB3197-028-Q1-M1-E4
accacttcttcccttccattttactttgttttagttgccataacgtcaccttccaatacaacccacaatgaggcaacaatatgtcttcactactctcacgttgctcatcctgttttccctcagttgttcaacaacattagcccaatctccggcactggccccggcaccttctggcccgacaaacgtcaccaagatcctcgaaaaagccggtcaattcaccctcttcattcgtcttctaaagtccactcaagtggccaaccagctgctcggtcagctcaacaattccaacaatggtatgaccgtttttgcaccaacggacaatgctttctccagccttaaatcgggcacattgaattcactcaccgatgaacaaaaagtgcagctggtgcaattccacatcgtcccaacatacctcaacctgtctcagttccaaaccattagcaaccctttgagaac

SEQ ID NO: 50829 - DNA, 443 bp, Gossypium hirsutum
  Clone ID: LIB3197-028-Q1-M1-E5
gcagctgcaggctcattgcatcccttcctatttctcttccctcaataatcaaaagcttcttctttctttctttgtctgagcgtgcactctcaaaccacaacaaaccaagatgagggaagaagataaaaatgaagctgaggcagttggaaactccacgcaaaccaccccgtctgaacgagaggattctttcgtctatgtcacggagatcagttgctggacatccttggcatgatcttgagattggacctggagctccagcaatgttcaactgtgttggggagataccaaaaggtagtaaagtaaagtatgaacttgacaagaagacaggattgattaaggttgatcgagttttatattcatcaatggtctaccctcataactatgggttcatgcctcggacactgtgagaagacaatgatcccttggattgcttggttatcatg

SEQ ID NO: 50830 - DNA, 396 bp, Gossypium hirsutum
  Clone ID: LIB3197-028-Q1-M1-E6
ggagattcggagagatcgcgtgatcgtcatgcatctggttcgaggagaaataggagtatgagtcctcgaactagaaaatgaactcctgtagattctgactcccctaaacatagtagagaaagttcacctaagcttaggaaatcatcccgtcctgggtcaacatcaccaagggatcacagaagaaatagggcatccccaaagaatgatgatgaaaagaaattgaaatatagaaagcgctctaggtcaatgtctgttgatttggataacaaaaagaatgagaccccagatggaaaaacaaagcaccgcatgaagaaggcgatcgaggtcattatcttcagaagggagacctcaaagaagaagcaagtcttcttctgcaagttcatatgaaaacaattc

SEQ ID NO: 50831 - DNA, 394 bp, Gossypium hirsutum
  Clone ID: LIB3197-028-Q1-M1-E9
cccacgcgtccgaccggattgaggtggtggacaagtctgccaactattactattacttaaaattcagttcccaagacaatgataaaccctagctagtgagtagccaccaccaagcttaaaaacagacctcacaaaagtcggaattggtttgttggtaggattgattgactactactctgcagatttcgtcccatttgcagagtgaggctgagatttagggtttagcagaagtctgtaaatggaagaaatcacccaaggtgtcaacaacatcaacttggtcgccgattcccacaagaagaatcggattcaagtctcgaataccaagaagcccttgtttttctacgttaatcttgccaagaggtatatgcagcagcacaatgaggtggagttgtct

SEQ ID NO: 50832 - DNA, 449 bp, Gossypium hirsutum
  Clone ID: LIB3197-028-Q1-M1-F10
attcaggacaaggaaggcatccccccagaccagcaaaggttgatcttcgctggtaagcaacttgaggatggccgcacgttggctgattacaacatccagaaggagtccacactccacttagtgcttcgcctccgtggaggaatgcaaatttttgttaagactttgactgggaagaccattacattggaggtagagagttcagataccattgataatgttaaggcaaaaattcaggacaaggagggaattcccccagaccaacagaggctgatttttgctggtaagcaactggaggatggccgtaccctggctgactataacatccagaaggagtccaccctccacttggtgctccgtcttcgtggtggtatgcagatttttgtgaagacacttactgggaagaccatcaccctggaagttgagagctctgacacaatcgataatgttaa

SEQ ID NO: 50833 - DNA, 318 bp, Gossypium hirsutum
  Clone ID: LIB3197-028-Q1-M1-F11
gcacacatgcgtaaatactgctgggaagccggagacgcgtgaagtgaggcgaattgcattctgggtggaacacaatggggatatcgaggatcggtacactcgtggttactagctaaatgctggcatgtccggcactttccgatatggttctatgcaaagtcgatcgacgtatttatttgacatccaacatggttcgaatatcttatactttagaggtggaaaaggcacgtacaaaaactgactctaaggttttgagggcttttactgaccttaaaacataaaacttggaatatgtgaatacttcctatcatgaagcca

SEQ ID NO: 50834 - DNA, 449 bp, Gossypium hirsutum
  Clone ID: LIB3197-028-Q1-M1-F12
ctttccaagacaaagcttcatattatcttttttagttccgacaaaagaaaacgaaaaaaaagaagaagaaatacaatcgttttctttttgaagtcgggttttagtttttggggtgaaaaaaatgttgggagtatttagcagtgcgatagtgtctccgccggacgagctggtggcggccggttgccgaactccatcacctaagataacggcggacgctctggtgaaacggttccttgagacgaactcctccggcgtgtccatgcacatcggagaccatgtccaattcgcttattctcaccataaagagtctcctttacagcccagatcatttgctgtgaaagacgaaatcttctgcttgtttgagggagcccttgataacttggggagtttaaagcagcaatatggtctggcaaagtcagcaaatgaagtgatattggtcattgaagctt

SEQ ID NO: 50835 - DNA, 237 bp, Gossypium hirsutum
  Clone ID: LIB3197-028-Q1-M1-F2
cccacgcgttcggtaaaagatggccgacggtgagggtagtcaacccctcatgtgggatggtggaactggaatggtgaaggccggttttgctgttgataatgctccaagggcagtttttcccagtatcgttggtcctcctcgacacactggtgttatggttgggatggctcatgatagatgcctatgtatgagataaagcacaatctaaaataggtatccttactttgaaatatctta

SEQ ID NO: 50836 - DNA, 424 bp, Gossypium hirsutum
  Clone ID: LIB3197-028-Q1-M1-F3
atagccatggcttcctcaccaaaactcttctctatgtctatcctcttcctttttgccctcttctccatgcaaatccatgctagagagtacttcagcaaattcccaagagttaacatcaatgagaaagagacaacaaccagagagcaaaagcacgagaccttcgttccccagaccacccaaaagccagaagaacaagagccaaggttcattcctgaaacccaaaatggttatggcctttacggccacgagtcaggctcaagccggcccagtttcaccaccaaagaaacctatgaaccctatgtcacccctgttagattccaccctgatgagccctataacagcatccccgaatcctccaacaataaagacacttactactacaacaagaatgcctacgagtccactaagcagcaaaacttgggcg

SEQ ID NO: 50837 - DNA, 453 bp, Gossypium hirsutum
  Clone ID: LIB3197-028-Q1-M1-F4
ggaacatcaccaccattaccataaccatgttgaaagtgcagagataggcttgttcaccattgatgaactacatacctttaacgtagggaagaaattacccatctttttcccaataaaaaaccactctctttaccctcctttattgcctaaacaaattgctgacaccatccctttttcatcttcccaagtttctaatattctacgattcttctcagtttctccggactcccccaaaggcaaagctgttcaagatacactcgcaaaatgcgaactcggagcagcgcaaggggagaccaaaatctgtgctacctctttagaatctttacatggttttctaagcaatgcatttggaccccatgttgatttcaagttcataagcacaaggcatcccaccataacaaccccactctttcaaaggtacacagttttagaatcccctgaagagattgaatc

SEQ ID NO: 50838 - DNA, 404 bp, Gossypium hirsutum
  unsure (1)..(404): unsure at all n locations; Clone ID: LIB3197-028-Q1-M1-F5
cggacgcgtgggctgcatctttgtcccttccctttgtcctaaacacagtgtgacttgaaaaccgagttcgttcatattgactcagtgaccacccattttctcccaccatttattttacctgtaagagaatccaatagaccaaaaccaaacaacaatgggttccatgccatctcctctcttcttcttcttttttcttctcttcacaatccaatgttgtttcagttcaaacactagtgagctaagagctttaatggatatcaaagcctctttagaccctgataatcaatacttaacttcatggaccactaaaagtgacccttgttcttttgaaggcttancgtgtaacgaacaaggccaagtagccaacatttccttacaaggcaaaagattgtccggcaaaatct

SEQ ID NO: 50839 - DNA, 364 bp, Gossypium hirsutum
  Clone ID: LIB3197-028-Q1-M1-F6
cggacgcgtgggcaaaattgacattaaaaaaaaaaaaaaagaacctaaagtaaataaaaaaagaacaagtccaatttgattccaacatgtagtgactacccaatgcctgacgcaaagccaaaattgaaaaaagaaaaaaaaaaagcaaagaaaaattatcaaaacaaaataaaaaagcctcacgaaaacaaaagctgaaaggtcttcaacaacgtcccacggaaaacgcagactagtttaagcttcctattaacccaatttctctctctctctctctctcccttcttcttcttggtcggtttagtcaggcaaaaacctcaatccatacccttcaaagatttctttggtatttaattctttttcg

SEQ ID NO: 50840 - DNA, 358 bp, Gossypium hirsutum
  Clone ID: LIB3197-028-Q1-M1-F7
gagggcgcggggatttaagctgtttagttggcggcgggcaaagtaagggtgaaaaattgaaaagaatgggaaaacgagacaagaaacgaaggcaccaacaaagatcatctcatagaggagcagcctcttattactctgtccaacacgatgatgattatgaagatgagagctccagttttcaacaaccatctcaagattttgaagaagaacaacaagaagaagaaccagaacaagaggaagaagaagatgacccaaacccatcaccggaaatgccatcaaaattcattctttaccaacaatctgtacagtcaccgaaaggagatataagctatttgcagaagttctttttgatgtatgt

SEQ ID NO: 50841 - DNA, 427 bp, Gossypium hirsutum
  Clone ID: LIB3197-028-Q1-M1-F8
gtttgaatacaaaaagaaagtaagggtaagccttttcattaatcctcaagcttttatttttgcccataagtctactcccagtttcccttaatcctccatgggcaaaggcggaggttgtgtcccaagcaaaaagagacaaccttcctctgccgaaggctctgccactgccactgccactaccgccaccaacaacgcacccatcgaagccgatgaagaaactcacgaaactgccagtgtagctgtgaatcctacgaatgcgcaatcagttaccgccactttaaaaatctttattggttactactccatgtatggtcacgtggagaaactggccaagcggatgaagaaaggggtcgacggcgtggaaggggtagaagcggttctttatcgggttcccgagacgctcccggctgatgtgctggaccatatg

SEQ ID NO: 50842 - DNA, 419 bp, Gossypium hirsutum
  unsure (1)..(419): unsure at all n locations; Clone ID: LIB3197-028-Q1-M1-F9
attctctctttgtcgtttgccgcgaaaccctggtgtctttacacattgtccccttctctcggcacccatggatattgaggccgagatccgtgcattgcagcttgactctgcagaagataataatgatgtgggcaatcctgaagatgcaaaactggaaaaagttgaaaaggaagatgangtggaggtggaggttgaggtggaaggcatgaaggatgaggttcatggaagatctcagccaggacaggcagagccaaaagtgaaaaacaaggaagtagttgctttggaggatgctgaagcacaggaagagatggaaacaaataagaagcgccacttgaatgtggggtttattggtcatggtgatgactggaaagctacaactggaggccagatactcttcctcagtgggcangtcgatgacc

SEQ ID NO: 50843 - DNA, 449 bp, Gossypium hirsutum
  unsure (1)..(449): unsure at all n locations; Clone ID: LIB3197-028-Q1-M1-G1
caactttttccttttggcagttaagtgaaacgatgccatactactcgaggggtggcgaagatgacgttgacgagttcgacgaattcgatccgacgccttacggtggtggatacaatctcgaactaacttatggtcgtcctttggaaccctccgatgagacttgctacccttccgctacaccctccgatggcgactttgattacgcacgtcccgatttctcttccggttacgcgcacttagcttatgccgacgaagccctcgaaactgaatacagtagctatcttaaacccaagccccgacctggacgattcgaacctgcacctgcttttggtgactatggaaggaaacctgaatatgagcaattcgaatctggtcatggacgcaaacncggattcggacgacccggctccgaatttgaatctgattttggccgaagacctgaattcgag

SEQ ID NO: 50844 - DNA, 431 bp, Gossypium hirsutum
  Clone ID: LIB3197-028-Q1-M1-G10
aagcaaacaaaggtaaaatggcaaggacaatggcaatggcgatcccttcacttcctcttctcttcctctttacatttctgcttctactcccacttctcatttcctcttcccctgttcaagaccctgagcttgttgtccaagatgttcacagggctatcaatgcgtccaggaggaacctagggtatctctcctgtggaaccggaaaccccattgatgactgctggagatgtgaccccaactgggagactaatcgccagaagctagctgattgtgccattggattcggcaagaacgccattggtggaagagatggtaagatttatgtggtcactgactccggcgatgatgaccccgttaaccccaaaccagggacattacggcatgcggtgattcaagacgaacccgtgtggatcattttcgctcgtgacatg

SEQ ID NO: 50845 - DNA, 438 bp, Gossypium hirsutum
  unsure (1)..(438): unsure at all n locations; Clone ID: LIB3197-028-Q1-M1-G11
aattgtttgagctagctagctcttactcaaatggcaaccaaaacgatgatgttgcaaatatttccacttttcttctttttgttcagtgtctgcaactccattttccttggtgctaatggagatgacaatggtggttggcaaactgcccatgccaccttctacggtggtgctgatgctaccggcacaatggggggagcttgtggttatggaaacctgtacagtcaagggtatggaacgagcacagcagctttgagcactgcacttttcaacaatggcttgagcctgggtgcctgctacgagctccggtgcaacaatgatcctcaatggtgcattagtcgaaccataaccgtgacagccaccaacttttgtccacctaactatgctttaattagtgacaatnggcgggtggtgcaatcccccacgagaacactttgattt

SEQ ID NO: 50846 - DNA, 450 bp, Gossypium hirsutum
  Clone ID: LIB3197-028-Q1-M1-G12
ggctttcattggtctcatagttggagccatgctcccttactggttttccgccatgacaatgaaaagtgtcggaagcgcagctctcaaaatggtcgaagaggttcgtcggcaattcaatacaattccaggactaatggaaggcagggtaaagccagactacgcaaactgcgtcaagatatcaaccgatgcctcactccgcgaaatgatcccacccggcgcactcgttatgcttactccacttatagtaggaaccctttttggagtcgaaactctagccggtgtcctagctggtgcactagtttccggtgtccacgttgccatctcagcttcaaacacaggaagagcatgggataatgccaagaaatacattgaggcgggtgttagcgaacatgcaaagtcattgggaccaaaaggttcagaatgtcacacggcagcagtgataggagacac

SEQ ID NO: 50847 - DNA, 365 bp, Gossypium hirsutum
  unsure (1)..(365): unsure at all n locations; Clone ID: LIB3197-028-Q1-M1-G2
cccacgcgtccgagtgaagctgctgaaacgctgaatgagatgcctataaaaaagctttacatgtcgattgagatggcagctcatggagaacaaggtggagcagcggaggcaatcttctctggccgagagaagattaagcttgcgcacttttacgactgcctccaggatgttgtccggtattagtttgaatgccttttattcattctgataatctgctcttctgtttcgtatagttatgtatattatgagtggatgaaattctaattattatttggtttattaatgatttgattgcttgttaatgcattaattgaacttagatcgctcttggngactatggaaggaaacctggatatgagcaattc

SEQ ID NO: 50848 - DNA, 423 bp, Gossypium hirsutum
  Clone ID: LIB3197-028-Q1-M1-G3
cccacgcgtccgctcttatcaattttcccccatcttaaaactaaagaaaattaacaatgtccgctgttgctccttctttttccttgagtgtgctctgttttgcttcattgctctcctttttggctgtggtgaatgcaagaatccctggagtttatactggtggagcttgggaaagtgcccatgctacattttatggtggaagcgatgcttctggaacaatgggcggtgcatgtgggtacgggaatctctacagtcaaggctatggcgtgaatacagcagctttaagcactgcactttttaacaatggccttagctgcggtgcttgctttgagattaagtgcgcaaacgaccccaaatggtgtcactccggcagcccttccattattatcactgccactaacttttgccctcctaactatgctc

SEQ ID NO: 50849 - DNA, 448 bp, Gossypium hirsutum
  Clone ID: LIB3197-028-Q1-M1-G5
ctctgaaaactaattgaaatcgtcggctgtctctcatggctgttcctctcgggcttccgccgccgtcgacacccaaaatggaggctcaccggctatcttctactaaacctgttcaagctctcaagccaacaaagaagatttctttagaggaagataccggtaaagcctccgacgcactgccgcttcccttgtacctaacgaatgccctgttcttcaccctcttcttctcggtggtttatttccttctttcccgttggcgtgagaagatccgtacctccacacctctccatgtcgtcaccttttcagagatcatcgccattctctcatttttcgcgtcctttatttaccttttgggtttctttgggattgacttcgttcaatctttggttttccaaccatcgcctgacgtttggattgccgaggaaaaagatgatgaagttctgcttgc

SEQ ID NO: 50850 - DNA, 409 bp, Gossypium hirsutum
  Clone ID: LIB3197-028-Q1-M1-G6
gttttcttttataatctctctattctctgacgcaaagagcgatataaaatctcacaattttccagcaatcgctaaaaaattataaaaatctcaaatctgatcccatggcttctcgccggcgtatgctgttaaaggttataattctcggtgatagcggggttgggaaaacatctctgatgaatcagtatgttaatcgcaagttcagtaatcagtacaaagctacgattggagccgattttttgacaaaagaggttcagtttgatgatagattgtttacattgcagatatgggatactgccgggcaggaaaggtttcaaagtttacgtgtggctttctatcggggtgctgattgctgtgtacttgtgcatgatgttaatgtcatgaagtcctttgataatcttaacaactg

SEQ ID NO: 50851 - DNA, 440 bp, Gossypium hirsutum
  Clone ID: LIB3197-028-Q1-M1-G7
agccaattgtttgagctagctagctcttactcaaatggcaaccaaaacgatgatgttgcaaatattttcacttttcttctttttgttcagtatctgcaactccattttccttggtgctaatggagatgacaatggtggttggcaaactgcccatgccaccttctacggtggtgctgatgctaccggcacaatggggggagcttgtggttatggaaacctgtacagtcaagggtatggaacgagcacagcagctttgagcactgcacttttcaacaatggcttgagctgcggtgcctgctacgagctccggtgcaacaatgatcctcaatggtgcattagtcgaaccataaccgtgacagccaccaacttttgtccccctaactatgctttatttagtgacaatgggggggggtgcaatcccccacgagaacactttgatt

SEQ ID NO: 50852 - DNA, 438 bp, Gossypium hirsutum
  Clone ID: LIB3197-028-Q1-M1-G8
ggaacaccatgtgggattgaacaagtttgctgatatgagcaatgaggagttcagaaaagcttacttgtcaaaggtgaaaaagcccatcaacaaagggataaccctgtcaaggaacatgaggagaaaggtgcagtcttgtgatgcaccctcctccttggattggaggaactatggagttgtgactgctgtcaaggaccaaggttcttgtggaagttgttgggcattctcatcaaccggagccatggaaggaatcaatgccttagttactggagacctaattagcctttcagaacaagaacttgtagattgtgataccagcaactatgggtgtgaaggaggatacatggactatgctttcgagtgggttataaacaatggcgggatcgatagcgaaaccgactacccctacactggtgtggatggcacatgtaacaccac

SEQ ID NO: 50853 - DNA, 387 bp, Gossypium hirsutum
  Clone ID: LIB3197-028-Q1-M1-G9
ggaccaccacgggggagggaacatgatcgctgttgtctgctgaggagtgcttaaacaaactcaatttcatatggggcaaccgccctttacttttatactgaccgtgtctaggatcataattgcgctaggccctatctgggattgctaccgcgatatctgatgaaactagctgcggatatgatactgttaacattgttcaaggcactggcgtaaattgctgtacatcatactcatccgaaacaatgcgattgatcttacggcaaacttacagggatcataatcaaactgtggactagaaactcaaactttgcgagctgatgctcaacttgatgatacgaatgatattcgactatacatattacggggactataacactggcggcatcg

SEQ ID NO: 50854 - DNA, 403 bp, Gossypium hirsutum
  Clone ID: LIB3197-028-Q1-M1-H1
aataagcatattccttattcttttctctctttctcaggtttttttgtagcagaagaagattatatagttaaagaggaatgagtcaacctaaaatcaagcgtcgtgtgggtaaatatgaggtgggaaggacaattggggaggggacatttgctaaagtgaagtttgcaagaaattctgagacaggggaagctgtggcacttaagatccttgataaagagaaggttctcaagcacaagatggctgaacagatcaagcgggaaatagcaacaatgaagttgatacagcatccaaatgttgttcgtttatacgaggtgatgggaagcaagacaaaaatatttattgttcctggagtttgttacccgggggagagctctttgataaaattgtaaacaatggacggatg

SEQ ID NO: 50855 - DNA, 447 bp, Gossypium hirsutum
  unsure (1)..(447): unsure at all n locations; Clone ID: LIB3197-028-Q1-M1-H10
cccacgcgtccgaatcacttgtttatcacgggagaaagtgcagaaaggtttctgggtttttcctttgcttactcaaggggatgaattagtctctaattttcaataatttgaaagaaatagcctttattcagagatgggacatactggtaactgcagatatttaagagaacaacttgtttttgctaagaattagtaccagctggattacattaacttgggatgagaacatataaggcgaagaccaatatagaagttaatggacaaaagggtgatggaggaatcaagaaccatggagttaatgatttcatggctcggaagaatccgatacaaggagcatcgtatatggcaagtcctagtgaagtagaaagacgaaaggaagaaaacaaagctcataatatgagcgagacctttttggcatctgatgcgccgganctggttgtatttatt

SEQ ID NO: 50856 - DNA, 100 bp, Gossypium hirsutum
  Clone ID: LIB3197-028-Q1-M1-H2
cttccgggacccctgggtggccaacaagcttctttgattaaattttaaaaaccaagttgggttattttttaaaaatggttgttgggaccaaaagtttttt

SEQ ID NO: 50857 - DNA, 427 bp, Gossypium hirsutum
  Clone ID: LIB3197-028-Q1-M1-H3
gaaagtggaccgctgggggtccgggtcggaattccgggttggaccaaggcttcggccaacgcgtccgaaagctccttttaacattccttacgtgcttgcttgcatataggttgatatatatatatatcaccagtgaagtggtatgttggaggatttgggaaacttttgttttaagattaaggatcataaaggatcgttgggccttattgttaagaagggatctatataatccttgtcaagggttgttaggttattgatgatttttgttgattaacttgtggttggatataggatgtattatatatttgggttctaaaaacatgttagggttgctatgattttggggccggtgggcaatatactataacttttgaaccggtccattcgaatgatagttctgttttgtgtaacctaaattaattatttg

SEQ ID NO: 50858 - DNA, 452 bp, Gossypium hirsutum
  Clone ID: LIB3197-028-Q1-M1-H4
cccacgcgtccggaaagatcaagatcggaatcaatggatttggaaggatcgggcgtttggttgcgagagttgctctccaaagcgatgatattgagctcgttgctgttaacgatcctttcatcaccactgaatacatgacctacatgtttaagtacgacagtgttcacggtcaatggaagcatcatgagcttaaggtgaaggactcaaagacccttctctttggtgaaaagcctgtcacagttttcggtatcagaaaccctgaggaaatcccatgggctgaggctggagctgagtatgttgttgagtctactggtgtttttactgacaaggacaaggctgctgctcacttgaagggtggcgcgaagaaggttatcatttctgctcccagtaaggatgctcccatgtttgttgtgggtgtcaatgagaaggaatataagcctgaccttaacatt

SEQ ID NO: 50859 - DNA, 434 bp, Gossypium hirsutum
  Clone ID: LIB3197-028-Q1-M1-H8
cagaaattaaaaaaaaaatttcaatttaattttattactaaagcgtaaagattcaagcttgcaatcgaattcctcatttgaaattctttgatgaaacaggtattagaactgtaataaagaggataaaaaaagatcattgttgaggatggcttgtaaaggatgcctagaatgcttgttgaagctgttgaacttcttgatgactcttgttggtttggcaatggttggatatgggatctacttgtttgttgagtacaaaagagctgctgatgttgccatgcttttgtcacctgtgggcactgaccaaatacagctcggtcggcccatgctcatggccgtgtctctttcgtctagtattttcgataatctttcaaaagcatggtttatatatttgtttattggaataaggtggggtctctttgttatatcttggttcg

SEQ ID NO: 50860 - DNA, 312 bp, Gossypium hirsutum
  Clone ID: LIB3197-028-Q1-M1-H9
ttcgggatgtaactttattcaaaattaccctattcaagtggcatagctgtagctgcaaaaattctgttttgtggaatgacataaacaaatatagctatatgaggattaaagcatgactaaagcctcttttgaaattaattcatatttttaaaactatacgtaaagatactggggaatgactccttaacagagtttaagaaacatattgtggacttaattgactgtctcagttagggggcggatgtgtgagacacaccttttttgcgcttaatgtacataagtcatgaaagcaatgcttggatctttttttaa

SEQ ID NO: 50861 - DNA, 340 bp, Gossypium hirsutum
  Clone ID: LIB3197-029-Q1-M1-A1
cgcaagtaagcgcagtgcacttgagcaattaactgaaatttctgcggctaatgatccctcgatttggagcaagtacttcaatcagattttgacagctatacttgaagttttagatgattctgattcttcaatcacagaacttgcgctgtcattgatagttgaaatgcttaaaaaccagaaagatgctatggaagattctgttgaaatagtaatcgagaagctgcttcatgtaacgaaggatattgtttcaaaagtttcaaatgaaactgtgcactgcttgaacactgtgctgtctcagtatgatccattcagatgtttaagtgtgattcgacacttatta

SEQ ID NO: 50862 - DNA, 433 bp, Gossypium hirsutum
  Clone ID: LIB3197-029-Q1-M1-A10
ctcccctctgtcttcgaaaaatatctagggtttttcatcttctcctttccttcgcctctctctcttttgaaactttaatcggaaagaaaaaatgcctaggtatgatgatcgccgtggtggcactcgcctttatgtcggtcacttgtcttcaaggacaagatcacgtgatcttgaggacatgtttagcagatatggaagagtacgtgatgtggatatgaagcgcgactatgccttcgttgaattcagtgaccctagagatgctgatgatgcaagatattcattgaatggtcgagacctagacggatgccgtatcattgtggaatttgccaagggagtgccccgtggccctggtggatcacgtgattatgctggaagaggtctactcctggatctgggcgctgcttcaattgtggaatcgatggccactgggctc

SEQ ID NO: 50863 - DNA, 368 bp, Gossypium hirsutum
  Clone ID: LIB3197-029-Q1-M1-A11
gctttagaaacataccaggaagggttgaaacacgatgccaataaccaggagctgctcgatggtgttcgaagatgcgtagaacagatcaacaaagccaatcgaggtgatttgagccccgaagaactgaaggaaagacaggctaaggcaatgcaagatccagaaattcagaacattctctcagatcctgtaatgagacaggttttgattgatttccaggaaaatccaaaggcagcacaagaacacatgaagaaccctatggtgatgaacaagatccaaaagctggtctctgctggaattgtgcaaatgagataaattgtgaaagtgatcaattgtaacttaaattgctttttttccttcataagaaattt

SEQ ID NO: 50864 - DNA, 312 bp, Gossypium hirsutum
  Clone ID: LIB3197-029-Q1-M1-A12
tgcgattatgacttgtaaagctgtttataataatgctgcttacaacaaatctataatcgaaaacaattgggggatggaagtcatcggattctataattattggaacgattacctgaggcaaccggatacccaagtggtgatgttccgaaacaaaacttcggagcacgacactattgttgtttccttccgaggaacacaaccgtttagtgccgacgattggtgttcggacgccgatctgtcttggtacgaattccccaacattgggaagattcacagtggtttcttgaaagctttggggatgcaaaaacttgt

SEQ ID NO: 50865 - DNA, 387 bp, Gossypium hirsutum
  Clone ID: LIB3197-029-Q1-M1-A2
gttggagagccttacaacagtgtgctgtccactcattcgctccttgagcacactgatgtcgctgttcttctggataacgaaacaatatatgacatctgcaggcgtgctttggacattgaacgaccgacttataccaatcttaaccgccttgtctctcaggttatctcatctattaccgcatctttgaggttcgatggacccctgaatgtggatgtgactgagttccagactaacctgatgccatatcccaggatccactttatgctttcttcttatgcccatgtcatttgagctgagaaggcttaccatgaacagctatcggtggatgagataaccaacagcgcttgtgaaccctcttcaatgatggccaaatgtgacccacgacac

SEQ ID NO: 50866 - DNA, 298 bp, Gossypium hirsutum
  Clone ID: LIB3197-029-Q1-M1-A3
ggactatgttgatatagtagagcacctggtggatcgatggaaggtgaaggagctagctgggctttcagccgaggggcgtaaagctcaagactacttggggtcactttctttgaaaattaaaaaggttaaagaaaaaaccccagaaaaaggccaaggaagcacccagtgtcccattcagttggatatttgatagagaagtgaaactttaggtcatgaaatacagttaaaactcctgcaatgcatttgaggaaacaaacacgaagaagctgaatgccaacttctctttatatatccgatg

SEQ ID NO: 50867 - DNA, 434 bp, Gossypium hirsutum
  unsure (1)..(434): unsure at all n locations; Clone ID: LIB3197-029-Q1-M1-A4
atttcttaaaaacttaaactctccctctccctcgacaccgctcagtagttcatcaccctttcagaggctctccggaccgtgcctttagctccgacaacaacggaggaagagcaatcggtccaaacgtgaggtacgccctctctctcttactgttatctccttaaaaatgctcgatagaatctcaaaacaaaaacaacaaatcccaaaaaagggttgaactatgaacaatcaaaagagaaaaaaaaaatgaacccagaaattaccttttttggtgctttttgatttttggattctgatttttgtattctgattgcgtatatttttttacagcatggtcttggtcctttttatagcgtctatatacagaatagaataaaataaaaataaaatccaaacaaatcgcccctgctctgtcatacttactttntttctct

SEQ ID NO: 50868 - DNA, 299 bp, Gossypium hirsutum
  Clone ID: LIB3197-029-Q1-M1-A5
catttttctgtagcaccccccaaaaagcttgtgcttggatatggctgaaaacccagtaaaatggctgtttctcattctagcaagctgcctgtgtttcgctttcgtcctgtcggaaagcaactcattaataaagaagacctacatcgtccaaatgcacaagtctgcaatgccagcatcattctccagtcctctggaatggtactcatcgaaattaaagtcggtaatgtccgatacccagagtgaaggtgaaggagatggtgaaaataggatcatctatagctaccaaaatgcttttcatg

SEQ ID NO: 50869 - DNA, 386 bp, Gossypium hirsutum
  Clone ID: LIB3197-029-Q1-M1-A6
gcgatattgtacgcgctggtcgcgcgtggatcggtgatgctggcggagttcacggcggcgtcgactaacgccagcgcgatcgccaggcaaattctagacaagattccgggtgacaacgacattaacgtttcgtattcacaagatcgatacatcttccacgttaaacgcaccgatggactcaccgttctttgtatggctgatgaaagtgccggaaggcgaattccttttgcgtttcttgaagacattcatcagagattcgttaggacttatggccgagcaatattttcagcccttccttatggcatgaatgatgaattttcgagggttttgaaccagcaaatggaatattactcgagcgatcctaatgctgataggataaatcgact

SEQ ID NO: 50870 - DNA, 403 bp, Gossypium hirsutum
  unsure (1)..(403): unsure at all n locations; Clone ID: LIB3197-029-Q1-M1-A7
aactcttctctatgtctatcctcttcctttttgccctcttctccatgcaaatccatgctagagagtacttcagcaaattcccaagagttaacaccaatgagaaagagacaacaaccagagagcaagagcacgagaccttcgttccccagaccacccaaaagccagaagagcaagagccaaggttcatccctgaaacccaaaatggttatggcctttacggccacgagtcangctcaagctcangctcaggctcaagccggcccagtttcaccaccaaagaaacctatgaaccctatgtcacccctgttagattccaccctgatgaaccctataacagcatccccgaatcctccaacaataaagacacttactactacaacaagaatgcctacaagtccactaa

SEQ ID NO: 50871 - DNA, 202 bp, Gossypium hirsutum
  Clone ID: LIB3197-029-Q1-M1-A8
aaaaatctttcatttctcgagtctttttcggggttttctcttttttttttcgtcggatcttcaacacttttttcaaaaatggctgagcacgaagagaagaagcacgaggaatcgttgatggaaaggatagccgagaagatccaaggtcatgattcgtcgtcatcggattccgataatgacaagccatcggaatcatcgatca

SEQ ID NO: 50872 - DNA, 164 bp, Gossypium hirsutum
  Clone ID: LIB3197-029-Q1-M1-A9
tcgaaagaaacacaatgactttgtcattagccagctatgaagaatcgcatattacttggatttcttcatctaattgtacgcaacaaagctggtgatcgtggagttgaaggtgccaacgacacctattgatgggccaaagccagacacttgtggacttggataaa

SEQ ID NO: 50873 - DNA, 414 bp, Gossypium hirsutum
  unsure (1)..(414): unsure at all n locations; Clone ID: LIB3197-029-Q1-M1-B1
ggataacggaagatagattgcagttgttggtcaatgttactggagcatttagaccgggtgtgcttacggctttggtcggtgtcagtggtgctggtaaaactacactcatggatgttttagctggtcgaaaaaccggagggctcatagaagggagcatacatatatcaggttatcccaaaaggcaagaaacttttgcaagaatttcaggttactgtgagcagaatgatatccattctccctgtttgactgttctggaatctcttttattctctgcttggcttcggttaccatcagatgttggcttggagacacanagggcgtttgtcgaggaggtgatggaacttgtggagcttactccattaagtggggcattgattggtctgccangagttgatggcttgtncactgaacaac

SEQ ID NO: 50874 - DNA, 221 bp, Gossypium hirsutum
  Clone ID: LIB3197-029-Q1-M1-B10
ggaagcttctcacccttaacaagaggattagctttggcgatttggtgttttcccatccctttgaaatcaaaagtacaagcatgttgatcaggttacgccaaacacatgcttgagatgcgagaaacgcgtggggctaacggggttaaagggctggtgcgggaaggatattactgggatccatgggtaaccctaacaacatactagtggggggggggggaagt

SEQ ID NO: 50875 - DNA, 421 bp, Gossypium hirsutum
  Clone ID: LIB3197-029-Q1-M1-B11
cggacgcgtggggtaaattcaaacaaaggtaaattaaacccaaaactttcataaaatcaaacccttcagctaacaagagacgaagaagatctaaagctactgccgggatgagaattactgtaatgactgcagatgaacagatccttagcttggatgttgatcctcatgaaactgttgaaaatttgaaagctttgctagaagttgagactatggtgccattgcagcagcagcaactgttgtttaatggaagggaaatgaacaactctgagaaattgagtgctttgggtgttaaggatgatgacctagttatgatggtctctggtgttgcttcaagtggcagtgcatctaagaatgacttgagcttgaatcctgatggatctgccgtgaatcctgcagctttcaacaacagattcgacaggat

SEQ ID NO: 50876 - DNA, 352 bp, Gossypium hirsutum
  unsure (1)..(352): unsure at all n locations; Clone ID: LIB3197-029-Q1-M1-B12
ctgaaaaatttccagctgagcaacaaaattcagaggacagtggcagacttaaggaatattttgggatgaactctccaacaaaagaccaattctttattgaaagaattggcagaccttccattggtgttgcaaaaggagaaaagacaagcaagctaaagggatctgaactaagcatggaatatgagactattgatttttccatgaaaagggtctcgaacatctatatagaggcaaagaaacatctctctgatctgctaacaaacgaggatcaaaatgaggatcttttgagtacacaggttccaaaaaccttangtaggattctttctcttcctgagtataatacatcccctgt

SEQ ID NO: 50877 - DNA, 346 bp, Gossypium hirsutum
  Clone ID: LIB3197-029-Q1-M1-B2
acgaaaatggcgtcaactgaaaacaattatgaccgctcttctgctaaatgacattgggattgaggggctggaaaggagtctatgctttgagcttacaaattgaaatcacaaggtttacatgttacggggtacgaatctgactgaatagctggtggaaagttaagaagtgtttcgagggatggtttgatatgggatgaaggagcaaatacaatgactgaaagtgagattgaagtgagaagtttgtttgatgatcttggtattcaagataagcaacaagttccaattgcacagaacaagcgggatattatgaaaaatggcgtgcctgtattgatacccttaaatcctt

SEQ ID NO: 50878 - DNA, 421 bp, Gossypium hirsutum
  Clone ID: LIB3197-029-Q1-M1-B3
ctttctttctatagaattagtcactcctgttctagatgaaggttctctccccaattcttgcttgcctagcgcttgctgtggtggtaagccatgctgctctctcacctgagcaatattggagctataagctgccaaatactccaatgccaaaggctgtcaaagaaattctacatccagaactgatggaggagaaaagcacctctgtaaatgtaggaggtggtggtgtaaacgtcaatacaggaaaagggaagcctgggggtgacacccatgtgaacgttggaggcaaaggagttggagtgaacacgggaaagccagggggtggcactcatgtgaatgttggagacccttttaattacctatatgcagccagtgaaactcaaatccatgaagacccgaatgtggctcttttctttctggaaaa

SEQ ID NO: 50879 - DNA, 391 bp, Gossypium hirsutum
  Clone ID: LIB3197-029-Q1-M1-B4
gaaaaggaagacaacgatggtgtctctgaagttacagaagcggctcgccgctagcgtcctgaagtgtggccgtggcaaggtttggcttgatcctaatgaaatcaatgaaatctccatggccaactccaggcagaatgttaggaaacttgttaaggatggttttatcatccggaagcctaccaagattcactcccgatctcgtgcacgcagaatgaaagaggccaagagaaagggtcgtcattctggctatggtaagaggaagggtaccagggaggcaagattgcctacaaagatcctttggatgaggagaatgcgagtactaaggcgtttgcttcgtaagtacagggaatccaagaagattgacaagcacatgtaccatgacatgtacatg

SEQ ID NO: 50880 - DNA, 302 bp, Gossypium hirsutum
  Clone ID: LIB3197-029-Q1-M1-B5
caaaaatggatggttattgtagcagaagggtaatcatgtttttggtgtttgcatttgcagcaataagcagagggtatggacaagaatcaaccactcttgttcctgcaatcatcacctttggtgactctgtggtagatgtgggcaataatgactatctccctaccatcttcaaggctaactatcctccttatggacgggactttgccaacaaaaagcctactgggaggttttgcaatggaaaattagccactgacatcactgctgaaactctggggtttacaacttatccaccagcttacctt

SEQ ID NO: 50881 - DNA, 400 bp, Gossypium hirsutum
  Clone ID: LIB3197-029-Q1-M1-B6
gaataattaaggggaaaaatatgcctagattgttatgactttcgttttgttgaaaaatgaccggacatccttggccgcacgatcgagcttccttccgatatcaaccctccatcaatcgtcgtcgcagtaaaaatatattacatctgttagggaagagagaagtctctcctagaacaaaatatgtaccaaagaagctgtggggagaagcacctaaacgaaatgtctattcttcaccttggactgaacccattagagatgccagacgtggtattctgtcatgggctgaggaagagtctttgcatcatttatcaggcatatatgggcctctggttgccttctccaagtcaacatttgcaccagcttttatttctgatggaagaacacttgcttctaccatggt

SEQ ID NO: 50882 - DNA, 340 bp, Gossypium hirsutum
  Clone ID: LIB3197-029-Q1-M1-B7
caggaaaagccttaaagcctattggggatgccctgcaacaggtttacattggtattgaggggctggaaaggagtctaggctttgacccaaatgatcccgttgtcccttttttccttctcactggcacctcagccactttatgggtgttttaccgggtatgggcatacggtggttactatggggatttatctcctcaactaactttggagctcttgtctggaaaggagaatgttttacttattgatgtccggcctgaagtcttaagggagaaagacggcattcctgatcttcggcgagcagctcggtctcgttacgctagtgtatcttttacctgaaggtc

SEQ ID NO: 50883 - DNA, 295 bp, Gossypium hirsutum
  unsure (1)..(295): unsure at all n locations; Clone ID: LIB3197-029-Q1-M1-B8
agagttatagagagagagagagtccctcttttctctctcttttcccttctttttgatcccaaaaaacactttccatacacagggaaactgctgttttcttctttcagagagagagagaaagagttgccaccatgtctcttggctatgcagagaagctctcattcatagaagatgtgggtcaagttggaatgactgagttctttgactctgctcatgtgttacaagataaaatggaacaacttgcaaaattgatagaaaagagtaacatctagtggtgttacaggtgcangaatat

SEQ ID NO: 50884 - DNA, 89 bp, Gossypium hirsutum
  Clone ID: LIB3197-029-Q1-M1-B9
catcattctgtgattgatcaatgcttggcgataaaaaggtctaattctggatttagaccttttattttaatttgatataatttggtgcc

SEQ ID NO: 50885 - DNA, 379 bp, Gossypium hirsutum
  Clone ID: LIB3197-029-Q1-M1-C1
caataatatacaaaattaaagggaaaaagaggaaatttttgtcttcttcaatttccgacaagatttatagggttttagcttaactacgatgcaaagatgcttcatttctagtgtttgtgttttttagggttggattttgattttatgtctgggttttggttgattgattccatggctgactggcaacagcttttgcaatcgattttcttaggtcttatattctcttatcttctagcgaagctaatctccttagtcgtttctttcaaagacgataacctttcgataacccgagcccgaagcagcaatgtccagggctacgagaaaatcgacgattcggtttccggatccgaaccgattggagtactgagcacttgggact

SEQ ID NO: 50886 - DNA, 367 bp, Gossypium hirsutum
  Clone ID: LIB3197-029-Q1-M1-C10
gatccatttgaccaagatgattgggagcactactccaaactaaccaatgaaatcggagaaaaagttcagattgtaggagatgatcttttggtcaccaacccaaagagggttgcgaaggctattgctgaaaaaacttgcaatgcccttcttctcaaggtcaatcaaattggatctgttactgaaagtattgaagctgtgaaaatgtccaagcaagctggatggggtgtgatggccagccaccgcagtggtgaaacggaggatacttttattgctgatctttcagtcggtttggccacgggccaaattaagaccggagctccatgcaagtctgagcgtttagccaagtacaatcagcttctgcgaattg

SEQ ID NO: 50887 - DNA, 427 bp, Gossypium hirsutum
  Clone ID: LIB3197-029-Q1-M1-C11
attttcttaagaagaacaactttcagctgaaacagccgcttcctccaacatggctagagggttgaagaaacacttgaagaggctcaatgcccccaggcattggatgcttgacaagcttggtggtgcattcgcgccaaagccatcgtctggaccccacaagtcgagggaatgtttgccacttattctcattctgcgaaacagactgaagtatgctttgacatacagagaagtgattgctattcttatgcaaaggcatgttatggtagatgggaaggttaggactgataagacctaccctgctggttttatggatgttgtgtcaattcccaagacaaatgaggacttccgtctcctttatgacactaaaggtcgtttccgccttcatgccatcactggtgatgagactaagtttaagctctaaagttag

SEQ ID NO: 50888 - DNA, 433 bp, Gossypium hirsutum
  Clone ID: LIB3197-029-Q1-M1-C12
gttatgcttcccttcgtcttcccgttcgttgtattctcttacattttcgatttgtttggtttgctttctttgcaaggtggtaaataatagcttacgtatcttctcttgtcagttttttttcccagtagccatcataattacttcattaaatatttggagattggttcctataccaggcaaagttactacgagggctgaagtaccttcactcggcaaatatccttcaccgagacttgaagcctgggaacctccttgtcaacgctaactgtgacctaaagatatgtgattttgggcttgcccgaaccagcagaggtaatgaacaattcatgacagagtatgttgtcacccgttggtaccgtgcacctgagctcctactatgctgtgacaattatgggacatccattgatgtttggtcggtaagatgcatctttgc

SEQ ID NO: 50889 - DNA, 150 bp, Gossypium hirsutum
  Clone ID: LIB3197-029-Q1-M1-C2
cttcttcttcttctgcatattcctcttctttggatcagacactttcttgcttgatcccctccccaccaacaccaactttttataccattgtacctgacacccaaacaggctgttttacttgtttcaaacaacacttagcaggttacagga

SEQ ID NO: 50890 - DNA, 394 bp, Gossypium hirsutum
  Clone ID: LIB3197-029-Q1-M1-C3
aagaagtccaactttctttcaattctactactcaaaactctcttcttcttttttatttctgaattgcttgtttcaaaatggtttggttttgggtacttgttttattcactgccaatttaaagttgggtttgactcacatccatggaggagagcaaccgttggctaaaatcaatatcctccaaacaaccgtcgcccttcacgaatccgcttctatttcagctgaacctgttcttcttggtttgaagggggaggatactgaatggataactgtgaatttcgttaatccgaagccgtctttggatgactgggttggagtcttttctccggcaaagttcgacccatcggcctgtccgccggtgaatgaacggaaaaaacagcttccatatatatgttc

SEQ ID NO: 50891 - DNA, 378 bp, Gossypium hirsutum
  Clone ID: LIB3197-029-Q1-M1-C4
caagttttggtagatctaataagatcaagtcgatccaaacatgtttctcaccagaactgagtatgaccgtggagtgaacacattttctccggaagggagattgttccaggtggaatatgctattgaggccatcaagctgggttcaactgcaattgggttgaagacaaaagaaggtgtcgttctggctgttgagaagcgtattacttcaccactgttggaacccagcagcgttgagaagattatggaaattgatgagcatataggatgtgctatgagtgggttgattgctgatgcccgtacacttgttgaacatgcacgagttgagactcagaaccacagattctcatatggtgagccaatgacagtagatccacaaca

SEQ ID NO: 50892 - DNA, 427 bp, Gossypium hirsutum
  Clone ID: LIB3197-029-Q1-M1-C5
tgtaattgttgcaattattttacaaacaaagttagagagtgttccatcatcacagatatatgcgcctgagtctcttagagcaggatatgcaatctttgcttcgggaattattgttggctttgcaaatcttgtttgcggattatgcgtaggaataattggaagcagctgtgcactgtctgatgcacagaactggtcactttttgtgaagattcttgtgattgagatttttggcagtgcacttggattatttggagtgattgtaggtataatcatgtcagctcaagcaacatggcctgcaaagtcagtgtaattttccgctcttagttacaacttagctctgtgagactgcaatctgttgaatgtattagttactgaaaatggcgcctacatatgtaaccatgtatttagaaacatgcttggacatgct

SEQ ID NO: 50893 - DNA, 438 bp, Gossypium hirsutum
  Clone ID: LIB3197-029-Q1-M1-C6
ctcttttttcagtaagattataaatttttatttgggagattccttttttttatattgtctcactttctcaaggcctccatttgagaaccatagctggagaaaaaaaacgtaattttattggaaacgaaacactgcgattaatctatctccagacaatcgacaagaaaaaaaatgcagcaccatatgctgattcaacagaaacaagccttgatgcaacaagctcttcttcaacagcagtctctctataatcccggcatattaactgctcctcagatagagccaattgccagtggaaatctgcctgctggttttgatccaagcacttgccgcagtgtgtatgtgggaaatatccatacacaagtgactgaaccactacttcaagaggtttttgcaagtactggccctgttgaaagttgcaagcttgtcagaaaggaaaag

SEQ ID NO: 50894 - DNA, 313 bp, Gossypium hirsutum
  Clone ID: LIB3197-029-Q1-M1-C7
tgcctttggaatgatggctgcagttttagtctcattgattgagtcaaccggagcttacaaggccgcctcacgtctagcaagtgcgacaccccctccagctcatgttcttagtcgtggtattggttggcagggcattgggatccttttgaatgggctatttggaacactgagtgggtcaacagtctctgtagaaaacgtggggctccttggaaacactcgtgttggaagccggagggtcattcaaatctcagctggctttatgatatttttttcaatattaggaaaattcggagctctgtttgcatcaatacct

SEQ ID NO: 50895 - DNA, 379 bp, Gossypium hirsutum
  Clone ID: LIB3197-029-Q1-M1-C8
cggacgcgtgggtttagatccagcaaaaatacagttttcttaagccttctttgatcctatattcctagtcaatacaatctgcagttttcagaaatactagtaatttagaaaaaaatggcttcaacggggggtctggtgcccataacaagggcgtttctcgcttcttattacgaaaagtacccattcgatccactcccagacgacgtgtctcgtctttcctctcagattcggtctttcatccaggatttgatccaaggctttcctccaactcaaggtgaaagcttatgaatacaagaagcagatagtcagcctccgcataaaatggatgagaacatgtggaaaaatagagaaatattgaagaaattgtgttttacttgaa

SEQ ID NO: 50896 - DNA, 89 bp, Gossypium hirsutum
  Clone ID: LIB3197-029-Q1-M1-C9
cggacgcgtgggccaatatatactttttacaatgttgtgtaagttgttgtaattgttctaatttttgtctaataaatctggtttgaatg

SEQ ID NO: 50897 - DNA, 270 bp, Gossypium hirsutum
  unsure (1)..(270): unsure at all n locations; Clone ID: LIB3197-029-Q1-M1-D1
cccacgcgtccggatgagatatcaaagtttggcgaggtttatgataaattctgcaaagaaaaaattgcccatttgcaagccttgaaaggttatgagcagaatggatttggaaaagaagcaattgagttgttttatttgatgcaagatttgggagttaaaccggattcctcaacatttgttagtttgttatctgcttgtgctcangtaggtgcaattggtttaagctgttgggtgcatgagtatattgctagaaactggtttgatctgaat

SEQ ID NO: 50898 - DNA, 439 bp, Gossypium hirsutum
  Clone ID: LIB3197-029-Q1-M1-D10
gaaaaattagttctatatgttcttttgggtacccttttccatttcttgtgcttctactttagatttatttttgtttcacataaaagcaatttgggtatgaaaaaaagctaaagattttgtttagaagtgatgtagtgaatggtttaataagtatagcagagcctaacagattttgatcctgattttactgattttaattacattgtcatgcaggtctagactctacttcaacagatagtgagttcttattttgaactgttttggtattctataaggaatttaagaacaataaattttaaacagatttagctaataccacccttccattacatattacagcaacaaaggttccaaacaatgtctgactccatcattacgaagaatatccttttcatcttatctagttgtttctatgcgaggggatgagttgcatgattag

SEQ ID NO: 50899 - DNA, 367 bp, Gossypium hirsutum
  Clone ID: LIB3197-029-Q1-M1-D11
cggacgcgtgggtgttcaaattgtgtcaaatgattcttctcctatggaagtggaacttgaaacttcctggttcttacaatgtcttcatgcttatttttgcttcttccttatcttcaccttgattacaattcttccacttttgtctctcttgtttagtttggtacccaaaccaaagctgtggtgcacctgtgagatttgtcacacatatctgaatatgagttggtcaaaacaattcgacaatctttgcgattggtacactcacctgctaaagaactcgccagggaacaccatccatatccatgttctgggcaatacaatcacagccaaccctgacaacgtggagtacatgctcaaaaccagatttgag

SEQ ID NO: 50900 - DNA, 440 bp, Gossypium hirsutum
  Clone ID: LIB3197-029-Q1-M1-D12
gtttgcagtcgatgcttgtactctaatggcgatcataacagaagaggtagagcccgaatcacccaaaacgagagtagacaagaaaactcccccaaaacctacttttaatcctaacccagtctcctcaaaatccgaccctaattcccaaactcaaaatccttttgccttctggttctatttcaccctcaccatcgctctcatcactttcctcttcgtctccttttcatctttgtccccacaagaccccaaatcctggttcctttctttgcccaactccctccgtcaacactactcaaatggtagaatcattaaggttcagacatctccaaaccaatcgccaattgaggtttttgtttctgaaaatggtcagttttcttcatctgagaatgttttggtcgttcatgggctggggctgagttcttattcttatagagaaatga

SEQ ID NO: 50901 - DNA, 319 bp, Gossypium hirsutum
  Clone ID: LIB3197-029-Q1-M1-D2
gaaccaaaaatcacacttccttttttctttttaccagggaacaccaaaaatagtcatgacattatacttgtgatcttaatgagttttgtttctcatccaaaaagagaacatcaaaaagctgatgcataagaatagcagtgtcttaccccttgtaccagggaacctcccaaaaaatgacattgaaaatgcgaaccaaaaatcactttgcagtcaagatcttgatcacggatgcagtcccaatccgatgcagagcaacaatcgaatccccattttggcataatccctttgccttggcatgctgaatagcaaactccaatgc

SEQ ID NO: 50902 - DNA, 408 bp, Gossypium hirsutum
  Clone ID: LIB3197-029-Q1-M1-D3
cccgttgaaaaaatatgggtttccaaagaaacatattgggtttccttttcttgatattggcttcactaacaagcctctcttctagccttcctagtgaatactccatagtggaacatgagattgacgcatttctttcggaggaaagggtgttggagatcttccaacagtggaaagaaaagcatcggaaagtgtaccggcacgccgaggaggctgagaaaaggtttgaaaatttcaaggggaatttgaagtatatcctagagaggaatgcaaagagaaaagcaaacaaatgggaacatcatgtgggattgaacaagtttgctgatatgagcaatgaggagttcagaaaagcttacttgtcaaaaggtgaaaaagcccattaacaaaaggataaccctgtcaaggaacatg

SEQ ID NO: 50903 - DNA, 333 bp, Gossypium hirsutum
  Clone ID: LIB3197-029-Q1-M1-D4
acgcaatccatggctaccctttcttcaactcattcttcctcacaaaacatcctcattacgttcaccataatattcctcgcatcatctcttctgccttcctattctgcaatcactgagactgaccaacgccgcccatttaagaagatatacgccttcggcgactccttcaccgacaccggcaacaccgagtccctcaccggccccaatggctttgtccgcgtttccaacccaccttacggcaccaccttctttcaccaccccaccaaccgctactccgatggccgactcgtcatcgacttcgtggctcagtcactgtctctgccgttcttgccg

SEQ ID NO: 50904 - DNA, 406 bp, Gossypium hirsutum
  Clone ID: LIB3197-029-Q1-M1-D5
gttccgcttctctagaggtctggtctactcaacactttctcctccctcttagcaaccaaagactcagatccgctcggatttctttgtcccagaactagaatggagacctttctattcacatcagagtctgtaaacgagggacaccccgacaagctttgcgaccaggtctctgatgctgtgctcgatgcctgccttgcccaggaccctgacagcaaggttgcctgtgaaacatgcaccaagactaacatggtcatggtctttggagagattaccaccaaagccaacgtagactatgagaagattgttcgtgatacatgccgctccattggatttgtttctgatgatgttggtcttgatgctgacaattgcaaggtcttggttaacattgagcagcagagccctgata

SEQ ID NO: 50905 - DNA, 364 bp, Gossypium hirsutum
  Clone ID: LIB3197-029-Q1-M1-D6
caaagcctcgttgattcgttactggaacaatcacatttccaacaatcttcccaagccaccatttcttatctccaaagcttccccactaaacgccattgacttggccaagctcactcaacttgccaatcataactctctgtcttcccacattgaatctttttgttccttagccaatcttttctgctcattccaggaggaatcctcgaaactagacgcagttggcaagggtaaaggggatgcaaacttcgcagtgtattccagtaaaaactttaaaggttatggctcgttaagtcgcggagggatcgactccttcaagaactactccgatgggttaaatactcccaatgagtcttttaagaaatac

SEQ ID NO: 50906 - DNA, 373 bp, Gossypium hirsutum
  Clone ID: LIB3197-029-Q1-M1-D7
cccacgcgtccgtctgtctgggtttagacaacaaagagcggaagagaaatagcggactcaacttctgcggatcacgcgtggcgtaagtatgagtgcttccaggttcataaaatgcgtcacggtcggtgacggtgccgtcggcaagacttgtctgctcatttcctacactagcaatactttccctaccgattatgtgccaactgtctttgacaactttagtgctaatgtggttgtggatgggaacactgttaatctgggattgtgggatactgctggacaggaagattacaatagattaagaccattgagctatcgtggagcagatgtcttcttgctggcattttctctcattagcaaagctagctatgaaaat

SEQ ID NO: 50907 - DNA, 343 bp, Gossypium hirsutum
  Clone ID: LIB3197-029-Q1-M1-D9
cagaaatacaaaatctaagaaacctcaaaaatgggaagctatagattctccttcactttcctcaccatttccaccatcctggccgtccacgtggcgctctcgtcttcttctcccactctcgacgtcgtcggcggcctttttctcccgattaaatcggaatgccgcggatccatcgccgagtgcctgatgctaagcggggaggagtcttcggacttcgatgctgagttcgccatggactccgagatcagcaggcgcattttagccaggactcgatacattagctacggtgcgttgaggaggaacacggtgccatgctcgcgacgtggcgcgtcctactataact

SEQ ID NO: 50908 - DNA, 220 bp, Gossypium hirsutum
  Clone ID: LIB3197-029-Q1-M1-E1
gatatccataaaaagcatgtcttgggcttgtttatttgttataaataatctgtgaaaattagggccttgtgttcattgatcttctgcaattgtttgtggagtaaagcagctagttgtctacatgttttaagtcgaagattgaagcttgagtctgtttacatttgaaatcataagagaaaaactttaagctcaaatgatcttgtaggcttttagtatctta

SEQ ID NO: 50909 - DNA, 414 bp, Gossypium hirsutum
  Clone ID: LIB3197-029-Q1-M1-E10
cccacgcgtccgctctggtttaaacatgggtatgggtttaaggaatggatttcttttgattttatcttgtgttgttacactttccctctcagttttggggcgacctgccactttccttgaagattttagaatcacttggtctgattctcatattaggcaaatcgatggagggagagccatccaacttgttctcgaccaaaattcaggctgtggatttgcttctaaaaggcagtatttgttcggacgtgtcagcatgaaaatcaagctcatccccggcgactccgccggaacagtcaccgccttttatatgaattctgttacagatgctgtgcgagatgagctagacttcgagttcttgggaaaccgtaccgggcagccatatacggttcaaaccaatatctatgcccatggaaa

SEQ ID NO: 50910 - DNA, 409 bp, Gossypium hirsutum
  unsure (1)..(409): unsure at all n locations; Clone ID: LIB3197-029-Q1-M1-E11
ctctcttttactcattcattctttagtttcaatatcaaagcaaaaatggcttcttcttgtaatgttgtttcaatggctttactggcttgtttggtgttgaactccttggtttttgttgcccatggtggtgacttttaccaggatttcgacctaacatggggtgacaaaagaggcaagattttcaatggtggcaagctcttgtctttgtctttagacagggtttcagggtctggttttaaatccaagaaagagtatttgtttggaaggattgatatgcaactcaagcttgttgctggcaactcagctggcactgtcactgcttattatctgtcatctcaagggccaacccatgatgagatagactnttgattcttagggaatctgagtggtgacccttacattttacaca

SEQ ID NO: 50911 - DNA, 357 bp, Gossypium hirsutum
  Clone ID: LIB3197-029-Q1-M1-E12
atcccaaaattccaaatgaaatctcttctccttttttttcccttctttttcccaaaatcgattccccccacctgaaatcttcttttttctccattttatttttccccccaatttccccaaattggcagccctctacatctccgttggatcgtattgtaatgtgttcgacacctgaaatctcttcgtttttcttggatcgtattgtatacgagatagtggataatgctgttgatgaggctcaagcaggttttgcaacacttgggaccgataccacttgggttgggaagaagcctttgaggcgcatcggaggaatgtccgatgctctctccattgccgtcgatcttggtttctctgttc

SEQ ID NO: 50912 - DNA, 295 bp, Gossypium hirsutum
  Clone ID: LIB3197-029-Q1-M1-E2
ctcaaagttcactacttgtgtgcagacaaaaatggcttttgctgggtttttcttgctggctttactttcaatggtctcagctgttcatggatatggtggtggatggactaatgctcatgctactttctatggtgggagtgatgcttcacgcacaatgggtggcgcttgtggctatgggaacctgtatagccagggatatgggacaaacaccgcatctttgagccatctctgttaacattgggcctaactgtgggtctttcttttacattaacgatgaaaatgatggcgaggggtt

SEQ ID NO: 50913 - DNA, 452 bp, Gossypium hirsutum
  unsure (1)..(452): unsure at all n locations; Clone ID: LIB3197-029-Q1-M1-E3
gatatccataaaaagcatgtcttggtcttgtttatttgttataaataatctgtgaaaattagggccttgtgttcattgatcttctgcaattgtttgtagagtaaagcagctagttgtctacatgttttaagtcgaagattgaagcttgagtctgtttagatttgaaatcataagagaaaaactttaagctcaaatgatcttgtaggcttttagtatcttattgaacttgatacagggtccatttgttttgcaaaaattgactttcaggaaataaattttgcaaaatagatttattttcactgacgctcagatttttttatcctaccaaattaaatcatgaaattttacttatgatttgataagaacaatgttacactgctgatcttttgcaaacactcattaaaaagggtaattcttagaattgatagangttttacaggtggagttgattt

SEQ ID NO: 50914 - DNA, 385 bp, Gossypium hirsutum
  Clone ID: LIB3197-029-Q1-M1-E4
gaaagaatgagcccttcaatgaaggaaacatcggtgagaaacaatggagaaaaagggtgaggatgttaatgggataatgaagaaggagcaagataagttgttcgatccaagtgaagccactcctttccggattaatgatatccgagctgctattaaaaagcattgttgggtcaagaacctttggaggactatgagttatgattttaggaactccattgtcttttctggactcttaggagcttcactttatttacgtatcttgatattattgtctaaatatttgggtgccgaagggaccatgttttggcctgtctttgtccttggacatgattgtgagatgaagcttctttgattatcccatacttaataaacgtgatgggacata

SEQ ID NO: 50915 - DNA, 422 bp, Gossypium hirsutum
  Clone ID: LIB3197-029-Q1-M1-E5
ccggaaacgatccgcaaaaatggtgcacagcgcctatgattccttccagctcatcaccgattgtcccactaagatcgacgccatcgaatcctacggctggaagctgctgctgggctgctccgatggttctcttcgaatctacgtttctgattcctccggcgctgaccgatctccaccgtccgacccgcacgcgttgcggaaggagccttacgcgctggagagaaccgttgcagggttttcaaagaagcctctgatttcaatggaagtactggaatcgagagagctactgttatcactctctgaatcgatcgcgtttcatcggctccccaatttagagaccattgctgtgatcaccaaagctaaaggcgctaatgtctactcttgggatgaccgtagaggttttctttgctttgctaggcaaa

SEQ ID NO: 50916 - DNA, 432 bp, Gossypium hirsutum
  unsure (1)..(432): unsure at all n locations; Clone ID: LIB3197-029-Q1-M1-E6
gtttctctctcaagctctttgcaatcccaaaaggagaaataaaaatcttcttggggaaggacatggcagccgaggaggctcttgacttgtcaactttgcagtctcagctaagtgaaactcatgaaatgtggaaccaggagatggaaaaacaccaatgccaggtagattttttacaagacaaaattatggaggtaaaggcttgcttacagggtccggaggaggaatcaaaggaggtagatgttctttggcgtanggtaaaaactactgcaactttgttggctaacttgaaatcaaaagcaagagtgatggctgttcctgatttagcccataagtcatgcggcatcaaaatattagaaggggtagggctcgtggataaggaaggtacaccgttgtctggatggtcaaggagtgctgatctcgcttcatttgact

SEQ ID NO: 50917 - DNA, 310 bp, Gossypium hirsutum
  Clone ID: LIB3197-029-Q1-M1-E7
gcgaatgtgggggatcaaatactgtttcacacacaggagcgaatatatgtaattaattaacacagcttgttttcgacgttgatgaaaaagcttatgtatttttttgatagatggagtgagcaatggctaacaatgtgggaattatagctatggaaatctacattaacgtgctaccggtgttaaacaggaaacaacacaagctcatgatggtgcttgattggggaaatacaccattagacttggacaagattgcatagtctttcgtacaaaactggaaaacgtgatatctatgagtttaacacttgttact

SEQ ID NO: 50918 - DNA, 438 bp, Gossypium hirsutum
  Clone ID: LIB3197-029-Q1-M1-E8
ggttatacgtttttctcatccactttctcaaaggaaatgggcgcttactgtgatgaaaatctctctttctctccggcttgtaatttgtctccttctcacgacctccggctctccaaacacgtccacgacaacgttcacggcaacatttatctcgatcctctctctttgaagtttattgacaccgagcaatttcaaaggctccgtgagctgaaacaacttggattggcacacctggtttatccaggggctgtacattccaggtttgagcattctcttggtgtgtattggcttgcgggtgaagctatgcaaaagctcaaaacttatcagggtttggagcttggtattgatcgatttgatgttcaagcagtgaaagttgcaggacttctacatgatgtaggccacggaccttttaaccacttggttgaacgggaatttttc

SEQ ID NO: 50919 - DNA, 408 bp, Gossypium hirsutum
  unsure (1)..(408): unsure at all n locations; Clone ID: LIB3197-029-Q1-M1-E9
atcgccttctatcaagacatcttccaaaaggtttctaatttagttattggtcctagtgttaaaatatgttaggattaggactcttttctctatttaagttcagttctttagttaataataatagaacagttttattaaaagctctcttgaaaactttcacctagcatgcacttcaaattactttatgcagtagcttttccatttttcatttattttgatcttctgtaaacatgataacagctttaataattagtcctattgtttaaaaagataaatgcttacttcagaaagtggcatgctagaaaaccttgttatattgttgctggtgccatgtttttacacattttcctttattttccatttcagaaaagggatgtggctgatggttacctaactcancatattttc

SEQ ID NO: 50920 - DNA, 194 bp, Gossypium hirsutum
  Clone ID: LIB3197-029-Q1-M1-F1
ctctcattaacacttttcttttcttcttgcaatgcctccaatctaggccgaaaagggagaaaagaaagctgtttcagatcagtatcccacccacattatcctattatattcctatccttgttctccttgtcttcgccatcacccaaaatgttcacccagttttttttcattgccattctttcttcactcctact

SEQ ID NO: 50921 - DNA, 445 bp, Gossypium hirsutum
  Clone ID: LIB3197-029-Q1-M1-F10
tccgcgatttgttcaattacttcaattcagttgttatagcagaccagtgctgtctggtttagttatttcaattggtggcttgcaagattctttgaggaaggcatcactgtcagcttttctggaatatcttaatgtcgatcaagatgttaatgaagaactcaaattgtgcaagttacccacggacatcctttggattctccaacagtataagcgatgtgacagggttattatacccacattgaagacaattgagattcttttcagcaaaaggatattcttggatatggaggcgcatacttcggctttctgttctggtgttttggattctctggcggttgaattgaaagcatcaaaggacttctctaagttatatgcaggcattgcaatacttggttacatttgttcagtttccgatcctatcaacgcccgtgccttttctcatctt

SEQ ID NO: 50922 - DNA, 379 bp, Gossypium hirsutum
  Clone ID: LIB3197-029-Q1-M1-F11
gttttacgtttatttgtgctgacggatctttaactatttgatccttgatctagatctggatttatgtttcccctgggatcttgatttctacgtaatatagcatattactagtattagaattcatattgaatctattattttttctacaatatctgcttgttttgtttgatcagggttatatttctatcatttgatatgatatgatgttctagctaattccgatcctgtgtataaattgttcttatctctgaaaacggatggtttatattatatgttaccatttatatgtcaaattggttttggtccttttttttttcattttattaatcgggcgaataagctgggatggaccctttttgggtgggtgtgtttttttttc

SEQ ID NO: 50923 - DNA, 374 bp, Gossypium hirsutum
  Clone ID: LIB3197-029-Q1-M1-F12
cttcatcatctatgtttggagtttgaatacaaaaagaaagtaaggttaagccttttcattaatcctcaagcttttatttttgcccataagtctactcccagtttcccttaatcctccatgggcaaaggcggaggttgtgtcccaagcaaaaagagacaaccttcctctgccgaaggctctgccactgccactgccactaccgccaccaacaacgcacccatcgaagccgatgaagaaactcacgaaactgccagtgtagctgtgaatcctacgaatgcgcaatcagttaccgccactttaaaaatctttattgtttactactccatgtatggtcacgtggagaaactggccaagcggatgaagaaaggggtcga

SEQ ID NO: 50924 - DNA, 296 bp, Gossypium hirsutum
  Clone ID: LIB3197-029-Q1-M1-F3
attgcaaccaaatgggcaaaaatattatcagttctcagaatataacaaaaacagatactattaaaattggttttaatctcttgaatatctttgatgattgctctgatgaccgatctgtcttgttctgaactttgacactttttgataatcgttttcgaatctcccattatttgtaaatctttaagccccatagatcttcccctctaaggcttgtaaccctgcatgtgcttctaccgcgaatggagttgtaatggtggtatggattactgactttgagaccaaaatctgcccaccct

SEQ ID NO: 50925 - DNA, 458 bp, Gossypium hirsutum
  Clone ID: LIB3197-029-Q1-M1-F4
cagaatgatacctaagatgccttttttcgctgataaatttaacttttgcccagttgtctcttcattttgacaatgactataaataattctgtaggtattcagacgtctggcgatgctaaacattttgcaatatccgcaaagatccctgagtttacaaataagaacaggacattggtcatccagtattccataaggtttgagcaggacattgaatgcggtggcggttacatgaagcttctctccggatttgtcaatcaaaagaaatttggaggggacacaccatatagcttaatgtttgggccagatatctgtgggacacaaacaaagaagctccatgttatactttcttaccagggccagaattaccctattaagaaggaattggaatgtgaaacagacaagttgactcatttctacacattcattcttaggccagatgcaagttatagtatcctcat

SEQ ID NO: 50926 - DNA, 415 bp, Gossypium hirsutum
  Clone ID: LIB3197-029-Q1-M1-F5
gataaaaaaagaaagttaaaacaaaaagaaaaaagaaaattctcaatccaaaatagggttagggttatccctgatccggataacgatttccacgctcgagtcttccaactgaaaaattaaacatgggcgccaattcgtcaccaacagacttgaccaccgatctcgatgagcagatctcgcagctcatgcagtgtaagccactttcggagcagcaggtcagagcattatgtgataaggcaaaggaaatactgatgaaagaaagcaatgtccagcctgtgagaagcccggtgacaatttgtggtgacatccatgggcagtttcatgatcttgcagaactttttcgaattggagggaagtgccctgatacaaactatttgtttatgggagaatatgtggatcgtggatactattctgt

SEQ ID NO: 50927 - DNA, 341 bp, Gossypium hirsutum
  Clone ID: LIB3197-029-Q1-M1-F6
ggatcggcgctgccgttgggaacccagccgacgtggcgatggtgcgaatgcaagctgacggacgcctccccgtatctcaacgtcgtaactataccagcgttgtcgacgccatcactcgcatgaccaaacaagaaggcgtcacctccttgtggcgcggctcatcgctgacggtgaatcgtgcgatgttggtgacggcatcgcagcttgcctcctacgatcagatcaaagagatgattttggaaaacgggctgatgaaagatgggctggggacacacgtggcagcgagcttttcagccggatttgttgcggcacgggcgtctaatcccgttgatgtgataaaa

SEQ ID NO: 50928 - DNA, 322 bp, Gossypium hirsutum
  unsure (1)..(322): unsure at all n locations; Clone ID: LIB3197-029-Q1-M1-F7
cccacgcgtccgtgttattgcccttgatcacctaaaaaattatatttatatcgaagcagacaaggaagcccatgtgagggaggctatcaaaggtatacgcaatatatttggagcaaagataatgcttgttccaataagggaaatgactgatgttttatcagttgaaagcaaagcgattgatctttcaagagatacctgggtcagaatgaagattgggacatataagggtgatcttgctcaagtagttgatgtggataatgttcggcaaaaagtcactgtgaaattgatccctanngatgacttacaagtcctagcgaataaa

SEQ ID NO: 50929 - DNA, 414 bp, Gossypium hirsutum
  Clone ID: LIB3197-029-Q1-M1-F8
ttatcttcttttcaatcaatggcttattatctatgttttatctctaatttcaaaagtaaaaaagatacccagatcctccattgatgctctgcaaatttccctacttcaagcaaaggtattctagtatttggcctgtagttgattttaattgatttttcggaggaaagaagcagcattctgtttggttaatggggggtagtagttccaaggagggaagttggaggcagggttcttcctatcattcaaatccaccttcatgggattctcatcaagggtatcctcagacatcatatggtcaagaaaaccatagttatccgcctcagtatagctatgcagagccgcagtattatccgtattcacaaccagagccacagcagcattatccacctccgcaaccaaaaccacagtatcatc

SEQ ID NO: 50930 - DNA, 443 bp, Gossypium hirsutum
  Clone ID: LIB3197-029-Q1-M1-F9
gccttttctcttctcctctgaaatctcgctctaagatttcgtcgtttatctttctccatctggattttgattgagctctctcttctttcgtcttaattggtttcactatgtcttcttatacccctaagaacatcctcataactggggcagctggttttattgcgtcacatgtcgctaaccggctcataaggaactacccagactacaagattgttgtgcttgacaagcttgattactgctcgaacctgaaaaacctccttccttccaagtcatctccgaactttaagtttgtgaaaggtgacattggtagtgctgaccttgttaactacctccttattaccgagtctatcgacacaataatgcactgtgcagcccagactcatgttgataactcgtttggaaacagctttgagttaccaagaccatatctatggactcatgtc

SEQ ID NO: 50931 - DNA, 435 bp, Gossypium hirsutum
  unsure (1)..(435): unsure at all n locations; Clone ID: LIB3197-029-Q1-M1-G10
aaataaaataaaagacgctagggatctcgatctcgatctcgatcccgatcccaatctcattctctccggcgacacctttctctaaccgtttccggtgagatctcgaggttggatccgatctcgacccgattcatagtgtctctttgacctagatccgaaccaccatggctccagtttctgctttggccaaatacaaacttgttttcttgggagatcaatctgtcgggaaaaccagtatcatcactcgctttatgtacgataaattcgataatacttaccaggctaccattggtattgactttctatcgaaaacaatgtacctcgaagatcggacagttcggttgcagctctgggatactgctggacaggaaagattcaggagtcttattccaagttacattanggattcctccgtggcagtcatcgtctatgatg

SEQ ID NO: 50932 - DNA, 407 bp, Gossypium hirsutum
  Clone ID: LIB3197-029-Q1-M1-G11
gaaagcttatctcttttcgtctctgaatctgatcaatcaacacctgaaaaggaaaacttacaaacaacaactactactagtctactacccagcactagaagcagctcgtagccagccatggatgaagagtacgatgtcatagttctaggaactggtctcaaggaatgcatcctcagcggtcttctttctgttgacggactcaaggttctgcatatggataggaatgattactatggaggagagtctacatcactcaacctcattcagctctggaagaagtttagaggaaatgataagcctcctgctcatttgggctctagcagagattataatgtggacatggtccctaagtttatgatggcaaatggcactcttgtgcgtgttcttattcatacggatgttacaaa

SEQ ID NO: 50933 - DNA, 421 bp, Gossypium hirsutum
  Clone ID: LIB3197-029-Q1-M1-G2
ggagaatccatccacctgtcaatacgctattggagaaaacaacaggtagcttaacttcattggccagttttctcgagaacacgtcgcaaaagattaatccccaaagtcaagtcgtttgatgcctcaagcttcgcttcgttttcctttcgtgtttgctgttgctttggttttgtttaaatgttttaaacaacgattcccagtttcgatttccaagtactccaactgaaaaaaaaaaaaaagaaaaaaagcacacgatccatttgagaaattaaattataaaagcagcgccaaagcttaggaacccatcacctattctctctcgaaatatcaaccttttttatttctggtgttgaaattgaagatccgataaaaaaattgtaaacatttcttaagttctggagagatccaatttctctcctga

SEQ ID NO: 50934 - DNA, 459 bp, Gossypium hirsutum
  Clone ID: LIB3197-029-Q1-M1-G3
atcagcctcaaggcctcctcccacaaagactgatggctccgtgactctggacaatggcatcatccgagtgaagctggacccgactggccgcctgacatccttggtcctggtggcctctggcagggaggccattgctgagggtgccgtggggaaccagtttgtgctgtttgatgatgtccccttgtactgggatgcatgggacgtcatggactaccacctggagacacggaagcctgtgctgggccaggcagggaccctggcagtgggcaccgagggtggcctgcggggcagcgcctggttcttgctgcagattagccccaacagtcgacttaaccaggaggtcgtgctggatgttggctgcccctatgtccgcttccacaccgaggtacactggcatgaagcccacaagttcctgaaggtggagttccctgctcgcgtgcggagttcccaggctaccta

SEQ ID NO: 50935 - DNA, 429 bp, Gossypium hirsutum
  Clone ID: LIB3197-029-Q1-M1-G4
atgaaatcaaatctttagatttattcatttaattttctctcttttgctctcatttcctgcaactccgatctataaaattccatcgtttgttggaaagagcaagagaggaaaattaaatcaaagataaaacgattattagcaataaaggacgacaatgaagaactgtgaaagactcgctaatttagctttagcagggttgacgttggcaccacttgttgtgaaggtggaccctaacttgaatgttattttgactgcatgcctcgcagtatatgtgggctgctatcgttctgtcaagccaactccaccattggagacaatgtctaaagagcatgctatgcgttttccgttcattgggagtgcgatgctgttatcacttttcttactgttcaagttcttatcaaaagacttggtaatgcagtattgacatgc

SEQ ID NO: 50936 - DNA, 399 bp, Gossypium hirsutum
  unsure (1)..(399): unsure at all n locations; Clone ID: LIB3197-029-Q1-M1-G5
ctgaatccttcatcgatacgacatggagtttccgtacatggaagctgttgttggttttatgatattaatgtacttatttgaaacttatctggacttacggcaacatgctgctctcaaattgccaactcttccaaaaacattggaaggagtaatcagccaagagaaatttgaaaagtctcgagcctatagtctcgataagagccacttccattttgttcatgagtttgtgacaatcctgatagattctgcaattttgttctttggcatattgccttggttttggaagaagtcaggaactttcttgcctttaataagtctaaatgaagagaatgaaatattgcacaccctttcattnttggctggtgttatgatatggtcacaaatcactgacctaccctt

SEQ ID NO: 50937 - DNA, 436 bp, Gossypium hirsutum
  unsure (1)..(436): unsure at all n locations; Clone ID: LIB3197-029-Q1-M1-G6
gcagcgccgatttctaatcccttccaaaagaaaggattagctaatcggtactcttctaccctccaagccgttgcagcatcttcttctttttttcatttttcttcccatttccttccaaccttttccctccttttcatgcttctatcctgaccaaccctttaacaaaccctaacaaccctcaacaaggccttcaattacgaatcgtatgaggtaacagagtaacagagagtagcagcaatggttcccaagttcgtgctactcctggtcatacaatgggttgtgttacctatgtcacgggagatggacctgatcaacctcagccaaggatggctttcacaggagatgctctgttgataaggggatgtgggaggacagattttcangtataatttcttgaaaatgttattngcagctatcgcanaaaaatggacgaata

SEQ ID NO: 50938 - DNA, 355 bp, Gossypium hirsutum
  Clone ID: LIB3197-029-Q1-M1-G7
cccacgcgtccgcggacgcgtgggctctggttctgcatttctgtgcctctcactctcgtgggaggattcttagggaccagagctgaagctatacaatatcctgtacgaaccaaccagattccaagggagattcctgcacgcaaatatccatcttggcttcttgttcttggtgctgggacccttccatttggaaccctgttcattgaactcttcttcatcctttctagcatctggcttggcaggttctattatgtatttggcttcttgcttatagttcttctactgcttatcattggttgtgctgaagtttcggtggtccttacctacatgcatctctgcgttgaggactggcgat

SEQ ID NO: 50939 - DNA, 419 bp, Gossypium hirsutum
  Clone ID: LIB3197-029-Q1-M1-G8
tgcttcttgaatcagttggcattttccaagatcatgaagaaatatgataagatcacattgcgaaatgcatcgaaagcttacttgcaaatggtggacaaatcatatcttggcagttctgatgaggttagtaagcttatgggaagggttgaggatacttatgttaaacactttgctaatggaaatcgtagaaaaggactgaaaactctaagaccacaagctaaaaaagaaaggcataggattacatttctctatggcttcttctctggttgctccattgcactaatagtggccattattgtgagcatacatgctagaaatcttcttaagagtcaaggaagagatcaatacatggtcaatatatttccactttacagcctatttgttacattgtcttgcatatgctcatgtatgctggaaat

SEQ ID NO: 50940 - DNA, 396 bp, Gossypium hirsutum
  Clone ID: LIB3197-029-Q1-M1-G9
gtgaagactacaggttctatgctatttcggctaagttaccagaagttaacaacaagggcaagactctagtcttccaattttctgtcaagcatgagcagcagcttgattgtggtggtggttacatgaagctactcagtggtgacattgaccagaagaattttggtggtgacaccccatacagcattatgtttgggcctgatatctgtggaagcacaaagaaagtacatgctattcttcattacaaggggacaaaccacttgatgaaaaaggaagttccatgtgagactgaccaacttactcatgtttacacatttattctccatccggatgctagttacaaaattcttattgataatgttgagaaacgaactggtagcttgtacactgattgggatc

SEQ ID NO: 50941 - DNA, 448 bp, Gossypium hirsutum
  Clone ID: LIB3197-029-Q1-M1-H1
gttagcttaacctttgcctttgccttgacttgatcactcacctaagctttccttctatatcactctttgcttaacttcaccccactgccaattcacactatttactatttagaataaaatactaaattataaatcccctttccaaacccaaaaaagctcgtagtaaacgaaacagcagcaaaaatggtgctcacaaccacgaccccggcgccggagcagtatgttgaatccagtacctttgcttccagatatgtccgccaacctctttccaggttccagatgccaaaaaattcaatgcccaaggaagcagcctatcaagtaataactgatgaactgatgcttgatggaaatcccaggttgaacttagcatcatttgtgaccacatggatggaacccgagtgcgataaactcatgatggcttcataaacaagactacgtcgacatggac

SEQ ID NO: 50942 - DNA, 348 bp, Gossypium hirsutum
  unsure (1)..(348): unsure at all n locations; Clone ID: LIB3197-029-Q1-M1-H10
tttgaagagcggctgctcagattttgcctatttctcagatttttctctcagtttgaaacgatgtctacggctggcgaagctgcttgttcttacgctgctttaattctctatgatgatggcattcccatcaccgctgagaaaattgcaacaattgttaaagctgcaaatgtctcggttgaatcttattggccaagcttgtttgcaaagcttttcgaaaagtgcaacattgaggatcttataaccaatgttggtgctggtggtgctggtgctccagttgccgcagctgcacctgttgctgctggtggtggtggtggtgccgctgctccacctnctgctgaggaaaagaag

SEQ ID NO: 50943 - DNA, 318 bp, Gossypium hirsutum
  Clone ID: LIB3197-029-Q1-M1-H11
cggacgcgtgggcggacacatgggcgaggatctgggcgtggaacccaaggaagcggcggatcgtgaggtggcaaagatacttcctcttcctgagctttgacaatccatttctacgatcaaagctgattatattacctcgaaacaggcaaatgacgcacaacttagtacaatgggtgcagagcatgttgagcaagcccaagcgggactcgaatcgcttaactcatctgagaaaacaataagccaactgcgtgaaaacgttatatctattgaaaacttatgtcgagagtgccaaaacttaattgataatcatgatcagat

SEQ ID NO: 50944 - DNA, 399 bp, Gossypium hirsutum
  Clone ID: LIB3197-029-Q1-M1-H12
gcaaacgcggcttcaggaatggctgtgcatgatgattgcaagctgaagtttttagaactgaaggctaaaaggacttaccgcttcatagttttcaagattgaagaaaaacaaaagcaagttgttgtggaaaaggttggtgaacctactgatagctatgaggctttcactgctagccttccagccgatgagtgtcgatacgctgtgtatgactttgattttgtgaccgatgagaactgccagaagagcagaatttttttcattgcctggtctcctgatacatcaaaagtaagaagcaagatgatctatgcgagctcaaaggacaggttcaaaagggaattggatggcatccaagtagagttgcaagctaccgatcctttcgagatggatctcgatgtcata

SEQ ID NO: 50945 - DNA, 395 bp, Gossypium hirsutum
  Clone ID: LIB3197-029-Q1-M1-H3
ctcatccaaacaacgaaaaaaggcttttttttttttgagaattttcccgagaaaattaaatccttgtccttaacccagatccgtagatcatcacctccaaattcttgccgataaattagttccttttagattcttttttttttttgcaaattccctttgttgggaaatcaaaatatattctttttttttttcattaatactgctaagtttttatctctcataacaacctaactttttctcttttctctcccacctagtaaatgcagcctgatgatcccaaaaacacttggtttggttcactgattaatgggtatttagtagatgttcaatagactttatccctttgcttctccttgtagtcactaaaaataacggttttttttttgaattttgga

SEQ ID NO: 50946 - DNA, 416 bp, Gossypium hirsutum
  unsure (1)..(416): unsure at all n locations; Clone ID: LIB3197-029-Q1-M1-H4
aaaggattgctaaactatctggtggtgttgcagtcattaaggttggggctgcaactgagactgaacttgaggatcgcaagctacgtattgaagatgccaagaatgctacctttgttgccatagaggaaggtattgtacctggtggtggtgctgcattagttcatctctcgacttgcgtccctgcaattaaggataagcttgaagaccctgaagagcgcataggagccgacattgtgcagaaggctttggtagcaccggcctcgttgatagctcaaaatgcangaatggaaggtgaggtagtggtggagaaggtaaagaacagcgagtgggagatcggttacaatgcaatgacagacacgtatgagaacttgctggcagctggagttattgacccggcaaaggtgacaagatgtgcg

SEQ ID NO: 50947 - DNA, 360 bp, Gossypium hirsutum
  unsure (1)..(360): unsure at all n locations; Clone ID: LIB3197-029-Q1-M1-H5
ctctgagggtgtcttaataaacgccttcgatttactttcggtttccatttacttctttatttctacgtttttgaatttttagtaagcgaaaatgagagagtgcatttcagttcacatcggtcaggctggtatccaagtcggaaatgcctgctgggagctttactgccttgaacatggaatccagcctgatggccagatgccaagtgacaagactgtcggaggaggtgatgatgcttttaacacctttttcagtgaaactggtgctggaaagcacgtccctcgtgctgtctttgtggatcttgagcctactgttattgatgaagtgaggactggtacttaccgtcagctnttccaccctga

SEQ ID NO: 50948 - DNA, 354 bp, Gossypium hirsutum
  Clone ID: LIB3197-029-Q1-M1-H6
attcacaaacacccccaaagtatatcacttttctttctttacaatcttcatttgttcagatttttgaagttctcataccatgggtgacagtcagtattcattttctctcacaactttcagtccttcgggaaagctagttcagatcgagcacgccttgacggctgtcggttcgggtcaaacatctcttggaatcaaagctgctaatggggttgtaattgctaccgagaagaagttgccttcaatcttggttgatgaaacatctgttcagaaaatacagtgtctgactccaaatattggagttgtttacagtggcatgggtcctgattttcgagttttggttcggaaaagtaggaa

SEQ ID NO: 50949 - DNA, 387 bp, Gossypium hirsutum
  Clone ID: LIB3197-029-Q1-M1-H7
gagacaacaaccagagagcaagagcacgagaccttcgttccccagaccacccaaaagccagaagagcaagagccaaggttcatccctgaaacccaaaatggttatggcctttacggccacgagtcaggctcaggctcaggctcaggctcaagccggcccagtttcaccaccaaagaaacctatgaaccctatgtcacccctgttagattccaccctgatgaaccctataacagcatccccgaatcctccaacaataaagacacttactactacaacaagaatgcctacaagtccactaagcagcaaaacttgggcgaggccattttcaccgagaaaggatggagcaccaaggaaaaccagacaacaactactacaacggaacattaa

SEQ ID NO: 50950 - DNA, 268 bp, Gossypium hirsutum
  Clone ID: LIB3197-029-Q1-M1-H8
ggatcatctcctttccttctccttcatgaaggctacgatttgaagactgtttttgatttccattagcatgcgaattaggccttttcgttataattcatcgcctgaaatatctgttatcgaatacgcttctacttttttttgtttcctgattttgattttagtgataacaactggaaattttgaatgctcgagctgtaatatgggatatttgaattcggttttgcaatcttcaagtcaagttcatgctgaatatggaccggttagcggc

SEQ ID NO: 50951 - DNA, 408 bp, Gossypium hirsutum
  unsure (1)..(408): unsure at all n locations; Clone ID: LIB3197-029-Q1-M1-H9
ttttcactcttttcagtcctacccaaaggcggcccctcaactctcctctcctttagcaatatctttccccttcactgtttcaactcaaagaaatggcggaggagaagaaggctcaatctgctggggtttggcctacggttaaaccttttgtcaatggtggtgcctctggtatgcttgctacctgtgtcatccaacccatcgatatggtcaaggtaagaatccaactgggtcaaggatcggcagcaactgttaccaagaacatgcttanggaggagggtgttggtgccttttacaagggtctatcagcaggactgctcangcaagctacatacactactgctcgattgggatcattcaaaatgttgacaaacaaagcaattgaagccaatgatgggaagcccttacctc

SEQ ID NO: 50952 - DNA, 228 bp, Gossypium hirsutum
  Clone ID: LIB3197-030-Q1-M1-A1
ggatgataaagttgttagggatttatgtcatgtcgagaattaaagatgaacatcatttgaggttctctcccaaagcacatttggcttcctatttgtgttttttcttttcggtgtagttttggtatcgtttgccaatttgttgtcctcgtctttatctaatttaaataaaattgtcaaatggtttgagcaaaaaccacaaggttggtaattgcggaccaagccttatcc

SEQ ID NO: 50953 - DNA, 414 bp, Gossypium hirsutum
  Clone ID: LIB3197-030-Q1-M1-A10
gtttgggagtgttgattgttgagagagaaaaaatgtgtgggatattagctgttttgggttgctccgattcgcaggcaaaaagggttcgagttctcgaactttctcgcaggctgaagcaccgtggtccagactggagcgggctctaccagcacggcgattgttatttggctcatcaacgccttgccatcatcgaccctgcctccggcgaccaacctctcttcaatgaagacaagagtgtcgccgtcacggtgaatggagagatttataaccatgaagaactaaggaagaatttggtgaaccacaagttcaggactggcagtgattgtgatgttatagcacatttgtatgaggagtacggggaagactttgtggacatgttggatggaatcttctcatttgtgctattggatactc

SEQ ID NO: 50954 - DNA, 325 bp, Gossypium hirsutum
  Clone ID: LIB3197-030-Q1-M1-A11
gagggtgttttattaaacgctgtagactgactttgggtttacattaactattttatgcttacgtggatgaatttgaagtctgcgaacttgaaacaatgcatgttagggtacatcggtcagggtgtattacaagatcgaaatgcgtggttggagctatagtgccttgaacaatggaattcagactgatggccatatgccatgagacatgactggctgaggaagagattatgcttataacacctttttcagtgaaactggtgctggaaagcacgttcgtcgagctgattgtgtggatctagagcctactgatatcgatgaggtgagg

SEQ ID NO: 50955 - DNA, 413 bp, Gossypium hirsutum
  Clone ID: LIB3197-030-Q1-M1-A12
gcaatcattagtggaacattctcgatcatcaatcagagccaatcacttagctgttttcctcgagtgaaggttattcacacctccgacaagatacatggccagatttatatccctgaaataaattgggtgctcatgatcctttgcatcactgtgactattggatttagagacacaaaacacatggggaatgcatcagggttggcagtgatgactgtgatgctggtgacaacatgcctcatgtccctcgttattatcctctgttggaacaagcctcccgctgtagctctttcctttcttcttttctttggttctattgagttgctttacttctcagcttcactcactaagttcacagaaggtgcttggcttcctattctgttggcccttttcctcatgacaatcatgtttgtatg

SEQ ID NO: 50956 - DNA, 162 bp, Gossypium hirsutum
  Clone ID: LIB3197-030-Q1-M1-A2
atgacaaaacgttcggagacctaagctgcaaaggttgaacaaaaatgacaatgagagaagctctgcttggaatttctattttgttaaaatttattgcttatttcatcgaaatttcgtctgctatcgatggatttgaggcctttttcattttctttcccgacc

SEQ ID NO: 50957 - DNA, 339 bp, Gossypium hirsutum
  Clone ID: LIB3197-030-Q1-M1-A3
gtaaccagagacaatgcattgcaattgatggaagctgaatttcaggttctttcacctttggttcctattcgtcaaattcaattcatccggttctgcaagcagcattccgacagtgtgtgggccatcgctgatgtttctattaatctgagcaatgctgcaaatgcactgatgtttgcaaattgcaggaggcttccttctggatgtgttatccaagatatggacaacaagtactccaaggttacatgggttgaacactcggaatatgatgagagcacagtccaccatctctttcggcccttactcagatctggatttggctttggtgcacaaaggtggatt

SEQ ID NO: 50958 - DNA, 414 bp, Gossypium hirsutum
  Clone ID: LIB3197-030-Q1-M1-A4
gctactgctacgaacttatggttacctggggatgtagctggtgtgaaagcgtggagacccggtggtgtgactcgctgaatcgtcaccaactcggtagaaacgggtttgtctttagggaaagttgctttgtaaacgcttatccactggtcttcacttctcctatggaagtatagagttgagtcatcaacccaacacggccacccaccgtgttcaacaaccttgactcggtgagtcccatcacgagtcaagaaaacataaatatcagtactcagttcttccacttccccaccccacccttctttcccatacgaagccacagctgtccaaaccccagacggagatacggcggggctaaagtcggcgattccggaaggagtgagtcgtcgagtcaacccgttcctaaatgagtcgagt

SEQ ID NO: 50959 - DNA, 367 bp, Gossypium hirsutum
  Clone ID: LIB3197-030-Q1-M1-A5
cccacgcgtacggaggaaggtagctaggtgtagttaaggttttcttatttgccatctgaaggcatgctgatccatggcactcaataagttgtaaatgtcagatttctgtttccacaggcctgatttgtaatttttagctcactcactcctgaatttcatttggtttatttaactacaatgtcagttgttgccgacttgccaccctctgctgctgaatgaaagattgaggaaaatagataaatttctcaacttgaagagagctggaaaaagcttcaatgctgaagttcggaataggaaggattataggaaccctgacttcttgctgcatgctgtgaggtatcaagatattgatcagatagggtcttgc

SEQ ID NO: 50960 - DNA, 361 bp, Gossypium hirsutum
  Clone ID: LIB3197-030-Q1-M1-A8
cagcaacactactaattttgagtatataaagtagagtgatctcgttttgtcgcgacaaggtggtcaggagagcaaaactgatccttcccggacactgacaaatagcaccagaaatggctgttggaggttttggcggcgtcgatggacctgtcagcagcttcaatggcaagatcacagcttcggtggtgatcacctgcattgttgctgcttcaagcggcctcatatttggttatgacattggaatttcaggaggtgtgacaactatgcaaccatttctccagaaatttttcccatcagttttaagaaaagcagcagaggctaaaaccaacatctattgcgtgtatgatagccaagttttaac

SEQ ID NO: 50961 - DNA, 390 bp, Gossypium hirsutum
  Clone ID: LIB3197-030-Q1-M1-A9
ctcactccgccatcttcaataatttcttccgttgatctttgttagagattagctttttaatttttcattatgggaaagatcaagatcggaatcaatggatttggaaggatcgggcgtttggttgcgagagttgctctccaaagcgatgatattgagctcgttgctgttaacgatcctttcatcaccactgaatacatgacctacatgtttaagtacgacagtgttcacggtcaatggaagcatcatgagcttaaggtgaaggactcaaagacccttctctttggtgaaaagcctgtcacagttttcggtatcagaaaccctgaggaaatcccatgggctgaggctggagctgagtatgttgttgagtctactggtgtttttactgacaag

SEQ ID NO: 50962 - DNA, 149 bp, Gossypium hirsutum
  Clone ID: LIB3197-030-Q1-M1-B1
aaagctttgaggaaatggcgttggctttcgatgagtacgggagacccttcattatactcaaagagcaagaccagaaaaccaggctgagagggatcgatgcccaaaagccaacatttcgtggcaagcgtgccgatctcgaacctttggac

SEQ ID NO: 50963 - DNA, 417 bp, Gossypium hirsutum
  Clone ID: LIB3197-030-Q1-M1-B10
aactcgatgagcttgaagaacagaggaaaagtgttgcatcctacatggaaagtttgaaaaatgcccagatagaagtagagagtgaaagagtgaagcttagggttgtagaggctcgaaacaaggatcttgaacgggatttatctgtagagagggaactaataaaagagttacaagaggagctgaagaaagagaaatattcacttcagctggctatccaggatgcctcttttcttcgaaagcagttagggaagaagcatactgaatttgttgaaatgagcaatgttctgcaaaataaagaagtagagctggtggaggctaaactcgaaatccagcatctgaaatctgagaaaagctctcttcagcttatattggaggagaaagaccaggaactctctgatgccaaaaagaatttagagc

SEQ ID NO: 50964 - DNA, 419 bp, Gossypium hirsutum
  Clone ID: LIB3197-030-Q1-M1-B12
cccacgcgtccggggagcagtaaaaatatcccctcaccaccgctactattattataccattactctactacagctgctatcattactacatacatgtccacccaaagtcgagcagttggcggcaccgagcacaactggtgccgagcggtggtcgggggaaccgggatagccgtcttggctatcatttcttccaaaaaccccgacgtttcacatcttaaaaatgccctccacaagctccaaatctcccatcccattcttaggtctcgcctccattacagtcctactgccaacagttactccttcgttacctccccctcccctttcattcaaatcaagtactttaaccattctacaacttgtcaaatccttgaaaacaaccaaaacatctcaccccttcatttgattctcgaacacgagct

SEQ ID NO: 50965 - DNA, 419 bp, Gossypium hirsutum
  Clone ID: LIB3197-030-Q1-M1-B2
aagctagtgtcttgatctcgttacatcctaaacaccaccgtagacccttaagaagactgaaggagcccgaccaaagaacaaggctccaacggattgatgtgcattaagccaacattcacgctggctaagccgttggccggatcctacaaacctatctcggacccaagggcatggattagatactccaaagccccgatggcgatgttaccatcacaaatgacggtgcatcaatattggagcagatggatgttgacaaccaaattgctaagttgatggatgaactgtctcggagtcaggattacgaaattggtgatggaacaactggtgtagttgccatggctggagcacttctagagcaggcagagcgggtatttgaacgtgggatcattccatacgaattgcagagggtgtccaaatgg

SEQ ID NO: 50966 - DNA, 401 bp, Gossypium hirsutum
  Clone ID: LIB3197-030-Q1-M1-B3
agaggcagcagtggcttgacgttcccctttgctcccttcttgcagaagccaaaagtttgagttaagaacaatggcttttgctgcaatgaagccgacaaaacctggtttggaggagtcccaggagcagattcacaagatcaggatcactctctcctccaagaatgtgaaaaaccttgagaaagtttgtgctgatttggttcgtggtgccaaggataagagactgagggttaaggggccagtgagaatgcccaccaaggttcttcacatcacaacaaggaagtctccctgtggtgaaggaacaaacacatgggatagatttgagctccgtgttcacaagcgagttattgatcttttcagctcccctgatgtggtcaagcagaacacatctatcaccattgaac

SEQ ID NO: 50967 - DNA, 262 bp, Gossypium hirsutum
  Clone ID: LIB3197-030-Q1-M1-B4
accatattctctatctttaaatgcgttcaaaacataatatagggggtgtgtcctacggggggaagtgtgaaaaaatgcccatatctaagttgaaagtgaaaaactcaagcttagggttgtacaggctcgaaacaagggtctatgacgggatttatcttttcagagggcactaataatataggttacagaggagctcaagaaggaaaattttcacttttgctggctttgccggatggctttttttttcaaagccgtttgggag

SEQ ID NO: 50968 - DNA, 426 bp, Gossypium hirsutum
  Clone ID: LIB3197-030-Q1-M1-B5
aaaaatatgggtttccaaagaaacatattgggtttccttttcttgatattggcttcactaacaagcctctcttctagccttcctagtgaatactccatagtggaacatgagattgacgcatttctttcggaggaaagggtgttggagatcttccaacagtggaaagaaaagaatcagaaagtgtaccggcacgccgaggaggctgagaaaaggtttgaaaatttcaaggggaatttgaagtatatcctagagaggaatgcaatgagaaaagcaaacaaatgggaacaccatgtgggattgaacaagtttgctgatatgagcaatgaggagttcagaaaagcttacttgtcaaaggtgaaaaagcccatcaacaaagggataaccctgtcaaggaacatgaggagaaaggtgcagtcttgtgatgca

SEQ ID NO: 50969 - DNA, 115 bp, Gossypium hirsutum
  Clone ID: LIB3197-030-Q1-M1-B6
gctaaagcagatcccaaaatgaagtttaatatcgcaaatccgactactggttgccagaagaagctcgagatcgatgacgaccagaagcttcgggcatttttcgacaagcgggatc

SEQ ID NO: 50970 - DNA, 333 bp, Gossypium hirsutum
  Clone ID: LIB3197-030-Q1-M1-B7
atagcatacagagatggagaggcaacaaagcacgcaggtttgtttgttgatgtggcttttgactgctgcctttttctaccacaatagggtcattgcagtgacctccactggccttggtgagcagaaaaactactatccagctactgaccctcatgctggaactccctcttcaagttcacatggtacaccaccatctctaggcggtggatcacctctctatcatggaaccccttcacatggaggtggttaccacccttaaccaacaccatcaacgccttgggttggaaattgtggaactacacacattgaccctttaacttaatcaacaccatt

SEQ ID NO: 50971 - DNA, 412 bp, Gossypium hirsutum
  unsure (1)..(412): unsure at all n locations; Clone ID: LIB3197-030-Q1-M1-B8
gtggagtgatctccaagaaattttgcagtttcttcatttaaagctcacatcacatttgctaaacaaaattttagttagtttatcgcaactaaatttcatttcaaatacccccttgattctccgatgtcgatcttcgagtataatgggagtgccctcgtagccatggtaggtaagaactgcttcgctatcgccagtgatcggagactcggagttcaactccaaacaatcgccaccgatttccagaggatttcaaaaatccacgatcgactctttctcggcctctctggcctcgccaccgatgctcaaaccttgtatcagaggcttgtgtttcggcacaagttatatcagctaagagaagagagggacatgaaacctgagactnttgctagccttgtttctgctattctttacg

SEQ ID NO: 50972 - DNA, 429 bp, Gossypium hirsutum
  Clone ID: LIB3197-030-Q1-M1-C1
cagccaattgtttgagctagctagctcttactcaaatggcaaccaaaacgatgatgttgcaaatattttcacttttcttctttttgttcagtatctgcaactccattttccttggtgctaatggagatgacaatggtggttggcaaactgcccatgccaccttctacggtggtgctgatgctaccggcacaatggggggagcttgtggttatggaaacctgtacagtcaagggtatggaacgagcacagcagctttgagcactgcacttttcaacaatggcttgagctgcggtgcctgctacgagctccggtgcaacaatgatcctcaatggtgcattagtcgaaccataaccgtgacagccaccaacttttgtccccctaactatgctttatctagtgacaatggcgggtggtgcaatcccccacgag

SEQ ID NO: 50973 - DNA, 410 bp, Gossypium hirsutum
  Clone ID: LIB3197-030-Q1-M1-C10
gcattggttcccagatttcaagttaataccgggttctttctccttttcttaatcccagatacccagatcttcaaaacaccaaagaagaccatgaaaaccaactccaaattgatcacaatcgggctagtaacagcctggtactcctacaacattggtgtattgggtgtaaacaaatatttactaagcaattatggtttcaaataccccatcttcttaaccatgtgtcacatgacagcttgttcattgttaagctacatcgcaattgcatggatgaagatggtccccatgcagaccattcgatctagggtccaattcttcaagatttcggcgttgagttcggtattttgtgtgtcggtggtgtttgggaatattattttgaggttacttccggttagctttaatcaggctgt

SEQ ID NO: 50974 - DNA, 418 bp, Gossypium hirsutum
  Clone ID: LIB3197-030-Q1-M1-C11
ggcacaatggggggagcttgtggttatggaaacctgtacagtcaagggtatggaacgagcacagcagctttgagcactgcacttttcaacaatggcttgagctgcggtgcctgctacgagctccggtgcaacaatgatcctcaatggtgcattagtcgaaccataaccgtgacagccaccaacttttgtccccctaactatgctttatctagtgacaatggcgggtggtgcaatcccccacgagaacactttgatttggccgaaccggcattcttgcagatcgcggaatatcgagctgggatcgtccctgttatgttcagaagggtgtcatgtgtgaagaaaggaggcatcaggtacaccatgaatggacattcgtacttcaacatggtgttgataaccaacgtgggaggggcagggg

SEQ ID NO: 50975 - DNA, 412 bp, Gossypium hirsutum
  Clone ID: LIB3197-030-Q1-M1-C12
gtttgtgatgtaatagtttgatgctttgtttcccgctcgtttgtgctgattttggacatgaatttgtacttgcaagactctaagcttacaaacctaggaaaaataatggaaattcatggtccaaagcttttagggacttcatacaaggatcccattgctagtttcaatctcttccgggagtacaccgtccgccatcccgaggtatattggtcaatcattctaaaagagctatcagttacatttcatgaacctcccaagtgcattctggatactactgacaaatcaagaccaggaggaacttggcttcccggttcggttttgaatattgctgagtgttgcttattaccctcaattcatcccagaaaaagagatgatagttgtgcaattgtatggagagatgaaggtgatgatg

SEQ ID NO: 50976 - DNA, 232 bp, Gossypium hirsutum
  Clone ID: LIB3197-030-Q1-M1-C2
caagcacctgtttgatctatctagttcatactcaaatatgggtcaaaccactcataatcccaatacccaaccttggaaggactttgaacgctcatacggaggatatcaagaaaactgatcttggagattagtgagacgctaagaacgatgcccatgcaacattgtacagtggtactgaatgtactgggacaactcaaggcgttggtccactttggaaaccatgcataaactg

SEQ ID NO: 50977 - DNA, 381 bp, Gossypium hirsutum
  Clone ID: LIB3197-030-Q1-M1-C3
atcaactctctctagattcctggagacagccaaaggtttcagtcaaaaaattttcggcttctttggattattttgagttctggtcacttggatccattcaggttggggttttacggtcgttgaatatgatcaaatcggtttaggttgatagggtacatgttttttttttaatcactttagaattaaagtcttatgtacttaagcatttgttgttttcataaactctaaataaatcagtctgatttttctttggagtctagataattttgtgtttgcagaaaacattgtagaacaagaaatggagatgataacgaatgtttcggaatacgaggtcattgcaaaggaaaaattgcccaagatggtttatgattactatgcatc

SEQ ID NO: 50978 - DNA, 349 bp, Gossypium hirsutum
  Clone ID: LIB3197-030-Q1-M1-C4
atcaactctatatagattcctggagacagccaaaggtttcagtcaaaaaattgtcggcttctttggattattttgagttctggtcacttggatccattcaggttggggttttacggtcgttgaatctgatcaaatcggtttacgttgatagggtacatgttttttttttaatcactttagaattaaagtcttatgtacttaagcatctgttgctttcataaactctaaataaatcacactgatttttctttggagcctacataattatgtgttcgcagaaaacattgtataacaaggactggagatgataacgtatgtttcggaatacgaagtgattgcgcaggaaaaa

SEQ ID NO: 50979 - DNA, 194 bp, Gossypium hirsutum
  Clone ID: LIB3197-030-Q1-M1-C5
attttgttagccataataagtagttttgaggcataatagatgcctttattcagttgtgctactgagtgtagttttatttggcgtgctttctttctttttgtcttgctgctccagtaccttatgtttggtagtgtttaagtaagccttaatagtttatatatcttaaatttgtgttgtcttgctattttgaatta

SEQ ID NO: 50980 - DNA, 370 bp, Gossypium hirsutum
  Clone ID: LIB3197-030-Q1-M1-C6
tctaggttttacttcatagagaaaaaaggggacgattagctgaaagaaagaaaaaaagcaaaaacaatggcgtcttcaagaggaggaggaagccaacaagtgatcagaacgggggatatggagaagatgagcttagatcagctcaaagcagtcaaagaacaagcagatattgaagtcaatctcttacaagacagtcttaataacattcgcgccgccaccggccgcctcgagaacgcctccgccgctctccacgacctttccctccgccctcaagggaagaaaatgttggttcctctcactgcttccctctatgttcccggcacactcgacgatgccgataaggttctcgttgatattggcactggatact

SEQ ID NO: 50981 - DNA, 283 bp, Gossypium hirsutum
  Clone ID: LIB3197-030-Q1-M1-C7
gctacacatcaagctgaggggcaacctaaggagatcgataacgctgctatcattgccacctaccttgctgatctgattgaagaggtgctgctgacttcttcagaagcagcattgtgagcagtaccatctccttgacctgctgaaactcacatgctttaggatagaccaaagagtcattaccatacacgcagattgtttggaggtagtcatatgctaactaaacccaggaatagttagtgttatgctaggcaaacagggttggacatgggtatctgaattacat

SEQ ID NO: 50982 - DNA, 413 bp, Gossypium hirsutum
  Clone ID: LIB3197-030-Q1-M1-C8
gagacctgtctatggttccatcaacagcttcagctatttgcgttcaagcccctgctgagaaaggatttgccagctttgccattgatttcctcatgggtggagtttctgctgctgtatcaaaaacagctgctgcaccaattgagcgtgttaagcttttgattcagaaccaagatgaaatgatcaaaagtggaaggctctctgaaccttacaagggtattggtgattgtttcaagcgaacaatcaaggatgaaggatttggttctttgtggagaggaaacactgccaatgttattcgttatttccccactcaggccttgaactttgccttcaaggattacttcaagaggcttttcaacttcaagaaagacagagatggttactggaaatggtttgctgggaacttggcatctggt

SEQ ID NO: 50983 - DNA, 414 bp, Gossypium hirsutum
  Clone ID: LIB3197-030-Q1-M1-C9
gtttgagctagctagctcttactcaaatggcaaccaaaacgatgatgttgcaaatatttccacttttcttctttttgttcagtgtctgcaactccattttccttggtgctaatggagatgacaatggtggttggcaaactgcccatgccaccttctacggtggtgctgatgctaccggcacaatggggggagcttgtggttatggaaacctgtacagtcaagggtatggaacgagcacagcagctttgagcactgcacttttcaacaatggcttgagctgcggtgcctgctacgagctccggtgcaacaatgatcctcaatggtgcattagtcgaaccataaccgtgacagccaccaacttttgtccacctaactatgctttatctagtgacaatggcgggtggtgcaatcccc

SEQ ID NO: 50984 - DNA, 409 bp, Gossypium hirsutum
  Clone ID: LIB3197-030-Q1-M1-D10
gaattaatgagacttttggtcagcctggttatgaacccattgtcttaattgataggccggtatccctttgtgaaaggtttgcgtattacactatagccgagtgcgttgtagtcacagctgtgagggatggaatgaatcttactccttacgagtacattgtgggccggcagggagtgtctgaatcagagtcttcctcagaatcaagtggaccaaagaagagcatgctagttgtgtcggagttcattggttgttccccttcattgagtggtgcaattcgtgtaaatccttggaataccgaatcaactgcagaggcaatgaatgaggcaatctctatgtctgatgctgagaagcagttgcgccacgagaagcattataggtacgttagctcacatgatgtggcattctggtc

SEQ ID NO: 50985 - DNA, 415 bp, Gossypium hirsutum
  Clone ID: LIB3197-030-Q1-M1-D11
ctgcactggttgaaaggatgccagttttggatgaggcaactttcagtggaaggagagctggctcgttgccgacatctgtttcaacttccactgggacagcacgtaatcttccaaatggaattgctaaaccagctgcagctcctgttgcagacttacttgacctaagttcagatgatgcccctgcacctaactcttctggtggtgattttcttcaggatcttcttggtgttgatttatcccctgcttctgcaccaccaggcacaagtcagcctccaaaagctggtacggatgttctgctggatcttttgtcaattggaacatctcctcctgcacaaagcagctcatctgcatctaacatattgtcctccattcaagacgacaaaacatcacttgtcaatttaaatggccttgcatc

SEQ ID NO: 50986 - DNA, 416 bp, Gossypium hirsutum
  unsure (1)..(416): unsure at all n locations; Clone ID: LIB3197-030-Q1-M1-D4
tgatttttcatctccatctccatctccatctctatctccttgctcttcctcctaaaaccctaaaatagaaatgctctccttgcagctcttctcctcaaatcctaagcccactctcctcgactatccgctcaacccccttttgtaccccaaatgcctaaaacctccaaaaccctaccccaaatcgaagcccgcccccatttcttctgtccttcaatggaatagaaagcctgagctggccggtgagactccacgcgtcgtcgttataacatccggaaaaggcggggtcggaaaaaccacaaccaccgccaatgtgggtctttccttagctcgtctggggttctccgtagtggccatcgacgccgacgttggcctccgtaacctagacctnctgtaggcctggagaatcgcgtgaacta

SEQ ID NO: 50987 - DNA, 424 bp, Gossypium hirsutum
  Clone ID: LIB3197-030-Q1-M1-D5
gaagaaacaacagaacacttgttttctcttctgaaatggatccgacaccgacgtccgataaccgacctgaaatctgttttttcgatttggagaccaccgtccctcagcggcgcggccaaggctactccgttctcgaatttggtgccattttagtttgccccaagaggctccttgagctccacagctactcctctctggtccgacccgacgacctctctcttatttcccctgcctctgtgcgctgcaacggtatcactcgcgaagccgtcatttcggcaccttccttttctgaaatcgccgacgaagttcacgaccttctccatggaagggtttgggcgggtcataatatagtgaggtttgattgcgtgagaataagggaggcgttcgagaagatggtagggcggcgccgagcctaagggaatat

SEQ ID NO: 50988 - DNA, 423 bp, Gossypium hirsutum
  Clone ID: LIB3197-030-Q1-M1-D6
aaaaaataccccaaaccatcaagcaaaatcatatagccgcttcttttgttgttttctctctctctcttaaagtttcatctctagagcctctggtttcctcttctccttctttttgcttaccagataatgtaaaagaatataacaaagcttttcccatttataaacccaaaaggagtttttttttcttgtccttgaaaaagaatggctttgagtaggttctggggttggtttcttatccacattgctctgtttttaagcttgtgttatgctgaggatccatttgttttctatgattttgaggtcacttacatcactgcttctcctttgggtgttccccaacaggttattgctataaataacaagttccctggccctactatcaattcaactactaacaacaatgtcgtcatcaatgttcgaaac

SEQ ID NO: 50989 - DNA, 401 bp, Gossypium hirsutum
  Clone ID: LIB3197-030-Q1-M1-E10
cccacgcgtccggtaacctttggtccctctggattgaccactgaagttaagtctgttgagatgcaccatgagtctcttcctgaggctctttcaggtgacaatgttggcttcaatgtcaagaatgttgctgtgaaggatctgaagcgaggatatgttgcttcgaactcaaaggatgatcccgccaaggaggcagctaatttcacttcccaagtcataatcatgaaccacccagggcagatgggaaatggatatgcacctgtccttgactgccacacctaccacattgcggtcaagtttgcagagttggagaccaagattgacaggcgatctggtaaggagcttgagaaggaacccaagttcttgaagaatggtgatgcaggatttgttaagatgattcccac

SEQ ID NO: 50990 - DNA, 413 bp, Gossypium hirsutum
  Clone ID: LIB3197-030-Q1-M1-E11
ctctctttctatattttttctttctgctaataattacttttgtcaccagcggcgtcggaagacaggaaaacaccggtgttgtttgaaatggcagcttcgagaatggatctggacgggagaccaataaagccaattacgatatgcatgattggagcgggaggcttcattggctctcacctctgcgagaaattaatgtcggaaacgccgcacaaggtgctcgccttggacgtttacaatgacaagattaagcacctcctcgagcctgactctctcccttgggctggccgtatccagttccaccgacttaacatcaagcacgattctaggcttgaaggcctcatcaagatggcagatctcacgataaatcttgcggcgatctgtactccggcagattataatacacgcccgctcga

SEQ ID NO: 50991 - DNA, 318 bp, Gossypium hirsutum
  Clone ID: LIB3197-030-Q1-M1-E12
gatgtgtgtagttttttcgggggagtttaatagaggggaggggctgctgagacactttataatatgcctagtctaaaccttgtacccatcggcaatttcgacagcgaatacaccttggccatcttttccgaaaccacctattccgtcgcttaactcattggcaaacctgatgcctatgcgatgattgtgttgaagggttttaatcccatgctatatggtggtactgatcattcacctgcctatggtgaactgctatcaattgggggccttagtccatatgtgaagatgaatctgattactgcaatctgccaaatttct

SEQ ID NO: 50992 - DNA, 425 bp, Gossypium hirsutum
  Clone ID: LIB3197-030-Q1-M1-E4
gaaattcaactgttactgagactaaaaagaaacatctgaattcagaattaagagaaccaaaatgagtgccttgacagagcttgtgattcttgtcccattttgtttcttcctcgtagctttaatcaagttcctttatgattacttgtgggtgcctctccgtatacagcgtctcctgaattcacagggaatcaaaggacctgcttacaaattcatccatggcaacaaccatgaagttaccaaaatgaaaaaggaagcattaagcaagcatctgggcctgacagatgatatatttcccaaggtgcagccacatatttacacttggatcaacagatatgggaggaattatctttattggaacggtattcgacctgaactggttatttcagagcctgaactagtcaaagaggttctcaaaaatagtgaaa

SEQ ID NO: 50993 - DNA, 400 bp, Gossypium hirsutum
  Clone ID: LIB3197-030-Q1-M1-E5
attcagagaaggatctgactgagcttggggagtgtccatatgatcaaggtgggtatttcattatcaatgggagtgaaaaagttctaattgcccaagagaagatgagcacaaatcatgtctatgtattcaaaaagaggcaaccaaacaaatacgcctatgtagcagaagttcgatccatggcagagacccaaaataggccaccaagtaccatgtttgtgcggatgctttcgcggacgagtgccaaagggggctcttcaggccagtacattcgtgctactcttccatatattcgtactgaaattcctatcataattgtgttccgggctttgggatttgttgctgacaaggatatattaaagcatatatgctatgacttctctgatacccagatgatggagct

SEQ ID NO: 50994 - DNA, 421 bp, Gossypium hirsutum
  Clone ID: LIB3197-030-Q1-M1-E6
gtgaaagtgaaaatggaggtttacagcagaaggctaatggttctggtgtttgcatttgcactagtaagcatagggtacgcgcaagagtcgaactcgaccactctggttccagcaatactgacttttggtgactcagtggtagatgtgggcaataatgattatctccccaccatcttcagggctaattaccctccttatgggagggacttcgccaaccaaaagcctactgggaggttttgtaatggcaagttggccactgacatcactgctgaaactctggggtttactacttatccaccagcatatctaagccctgaagcatcagggagcaaccttcttattggagccaattttgcttcagctggatctggctatgacgatagagctgcctctttgaaccatgctatcacgttgagtcagc

SEQ ID NO: 50995 - DNA, 351 bp, Gossypium hirsutum
  Clone ID: LIB3197-030-Q1-M1-F10
aatgggagagtatatatcaggtagatttaagaatctgcaacctctaaggaacaatatggaataggggaagtttgatggtggatctaatagggctttaagagaacgaatcatgcttgttcttctattccaagatattggatgccgtgatgtgcctttaatgaatggttcttcaacatgcataaactcttcgtttgcttcttccttcttgcatataattttctttctcttatgcccttcaagtggctagctacaacttgtgtttgagtagtagtctgtatgttatgtacatatgaataaacgatgctaacattttttctgttaataaactgctataaatcaaaattgaatagg

SEQ ID NO: 50996 - DNA, 414 bp, Gossypium hirsutum
  Clone ID: LIB3197-030-Q1-M1-F11
cttagaaggtgtcttaataaacgccttctttcttcttcttcttattcctttattgctttttagaatttttcttaatcgaaaatgagagagtgcatttcgatccacatcggtcaggccggtatccaggtcggaaacgcttgctgggagctttactgtctcgagcatggaatccagcctgatggtcagatgccaagtgacaaaactgtcggaggaggtgatgatgcttttaacacctttttcagtgaaactggtgctgggaagcacgtccctcgtgccgtcttcgtggatcttgaacccactgttattgatgaagtgagaactggtgcttaccgccagctcttccacccagaacaactcatcagcggcaaggaagacgcagctaacaactttgcccgtggtcactacaccattggc

SEQ ID NO: 50997 - DNA, 411 bp, Gossypium hirsutum
  Clone ID: LIB3197-030-Q1-M1-F12
gctctctgtagccgccgcctgcgtctctctcttcatctctctgaaccaaaaagtctttagcttttcgcttcgagagagaccatgttggtttaccaggatctcatctccggtgacgagcttctttctgactcattcccctacaaggaaatcgagaatgggatgctgtgggaagttgagggaaagtgggttgtgcaaggagctgtcgatgttgacattggtgccaatccttcagccgaaggtgctgatgaggatgaaggtgttgatgaccaagctgtgaaggttgttgacattgttgacactttcaggcttcaggagcaaccccctttcgacaagaagcagtttgtcgtgttcatcaagaagttcatcaagaacttgacaccaaaactggatgcggaaaagcaagagtccttc

SEQ ID NO: 50998 - DNA, 332 bp, Gossypium hirsutum
  unsure (1)..(332): unsure at all n locations; Clone ID: LIB3197-030-Q1-M1-F4
tttgcgtttaggtttttgttctttgaatactttagagctgcattcatgctgtgtgggttgtgcagacgagaagtgtggttaaggtgtgtgagtacttcaaatgaggtacactttgtattgtagggttcttttctttccttttttttttaatgtaatttaatttattgaagatcctataatgacaacagaacaatgttggaatatttgtttgttccctgttagttgttgaaagtaatatcaacttgggccgattgagcctttgcttgttcggcnnngaaaaagngtgagatgtgcatattaattaaaaatgctaacaatatttctgttaataa

SEQ ID NO: 50999 - DNA, 427 bp, Gossypium hirsutum
  Clone ID: LIB3197-030-Q1-M1-F5
cttattctgttgttttggagagttttacttaaacgccttctgtgttcttcttcttattggtttattgcttttttaaattatttttaattgaggatttattgagtgcatttcgatccacatcggtcaggccggtatccaggtcggaaacgcttgctgggagctttactgtctcgagcatggaatccagcctgatggtcagatgccaagtgacaaaactgtcggaggaggtgatgatgcttttaacacctttttcagtgaaactggtgctgggaagcacgtccctcgtgccgacttggtggatcttgaacccactgtttttgattaatttagaactggtgcttaccgccagctcttccacccagaacaactcatcagcggcaaggaagacgcagctaacaactttgcccgtggtcactacaccattggc

SEQ ID NO: 51000 - DNA, 410 bp, Gossypium hirsutum
  Clone ID: LIB3197-030-Q1-M1-F6
gtttaaggagaccttcacgctccccactttgccctctcccattttctcacctgaaaaaagcggacaattcttcatcgtagcgtcaggtaaatcgggtgataaaccgggcacgagcttcgatttcaaattgtcaatacctcctaagtcatgacccaaagatttccccttcacctactcaacatttccattcaaaatcatccattcgcttcttcgatatttacaagcttgcaagcaaggaaaaaatggagaaagaacgagcaagactcaaggaagtttcctgccatggatgttatatattctgatggtagaaaatcaaagctgccgattgtttttgatgcaagtggcgttgattctagcaagttggctgtccctgaaggatctttagtctgtctaccatttagagcaaactc

SEQ ID NO: 51001 - DNA, 408 bp, Gossypium hirsutum
  Clone ID: LIB3197-030-Q1-M1-G10
cccacgcgtccgatttcaaattgttatctctgaaggtgtcttaataaacgccttcgatttaccttcgatttccatttacttctctattgctacgtttttgaatttttagtgagcgaaaatgagagagtgcatttcagtccacatcggtcaggctggtattcaagtcggaaatgcctgctgggaactttactgccttgaacatggaatccagcctgatggccagatgccaagtgacaagactgtcggaggaggtgatgatgcttttaacacctttttcagtgaaactggtgctggaaagcacgtccctcgtgctgtctttgtggatcttgagcctactgttattgatgaagtgaggactggtacttaccgtcagcttttccaccctgagcaactcatcagcggcaagga

SEQ ID NO: 51002 - DNA, 414 bp, Gossypium hirsutum
  Clone ID: LIB3197-030-Q1-M1-G11
aattgtttgagctagctagctcttactcaaatggcaaccaaaacgatgatgttgcaaatattttcacttttcttctttttgttcagtatctgcaactccattttccttggtgctaatggagatgacaatggtggttggcaaactgcccatgccaccttctacggtggtgctgatgctaccggcacaatggggggagcttgtggttatggaaacctgtacagtcaagggtatggaacgagcacagcagctttgagcactgcacttttcaacaatggcttgagctgcggtgcctgctacgagctccggtgcaacaatgatcctcaatggtgcattagtcgaaccataaccgtgacagccaccaacttttgtccccctaactatgctttatctagtgacaatggcgggtggtgcaat

SEQ ID NO: 51003 - DNA, 406 bp, Gossypium hirsutum
  Clone ID: LIB3197-030-Q1-M1-G12
cggacgcgtgggttccaatctttcattctttgctgttgaagtagtaatatctatagcatacagagatggagaggcaaagaagcaagcaggtttgtttgttgatgtgggttttggttgctgcctttttctcccacaatagggtcattgcagtgacctccactggccttggtgagcagaaaaactactatccagctcctgaccctcatgctggaactcccccttcaggttcacatggcacaccaccatcttcaggaggtggatcacctccctctcatggaaccccgtcacatggaggtggttaccacccttcaccaacaccatcaacgccttcgggtggaaattgtggaactcccccacatgacccttcaactccatcaacaccatcacacactcctcctcatggtac

SEQ ID NO: 51004 - DNA, 410 bp, Gossypium hirsutum
  unsure (1)..(410): unsure at all n locations; Clone ID: LIB3197-030-Q1-M1-G4
gtattttgctggtgttatggttcggttgaagcagaaataaagaccagctgggaaaaggaaaagcaggatatggaaatcaaacatgaaagatgaccacgctgttggctgatgctcagagacagatgcaatgatgggaatgtgatccttggcatatgttggatccagcaaagagtaaaaccttcctgtccaaggtgaaatataaccagataccatgcctaatcccaaagcagtaccacccacagcgactgcacaagtcacggtgatcctcaagaaagcttgaaacaattttgtgtcactaagcatgtgcttcacccaatctaaaaagtagaaaacctgcatcaagaagaagacgcccatgacggccatatgttcaccggattgcacatgttgaaacccgacanagcggatct

SEQ ID NO: 51005 - DNA, 315 bp, Gossypium hirsutum
  Clone ID: LIB3197-030-Q1-M1-G5
gccacgcgtccggaagccttaaactggaagacaaagattactaccattgatgctgaactaagaggattggttgaatggctttgcgcacagctgaagaagccttaccatcctagtcgcggtgttccaactgatattaactgccttgcagcattgatgatagaacgctgtgtcagatcctcctttgttgaaacggatggagcgaagatgttgattcctttaatttgtacagcctccacacagcaatctatccagcttctttacgaaacatgactttgagagtggctatgatcttactatgaaccggtaatcgaggac

SEQ ID NO: 51006 - DNA, 380 bp, Gossypium hirsutum
  Clone ID: LIB3197-030-Q1-M1-G6
gggattatcaatttgaagccttcttcgaaattcctctttcaagatgcaaattttcgtcaagaccctcactggcaagaccatcacccttgaggtggaaagttctgataccatcgacaatgtaaagaccaagatccaagacaaggaagggatcccaccagaccaacagaggcttatctttgctggtaaacagctggaggatggccgtacccttgctgactacaacatccagaaggaatccacactccatttggtcctccgattgaggggtggtatgcaaatttttgtcaagaccctcaccgggaagaccatcacccttgaggtggaaagttctgataccatcgacaatgtaaaggccaagatccaagacaaagaagggatcc

SEQ ID NO: 51007 - DNA, 378 bp, Gossypium hirsutum
  Clone ID: LIB3197-030-Q1-M1-H10
cttgtttaataaataatatggtgctctctaacggcgatctcagctgaagagagcggcgaatcgaaggagtttgtcttgactttggatcaatctaatttcactgacaccgttagtaagcaagatttcatagtcgtcgaattttacgctccttggtgcggacactgtaagaatcttgctccagagtatgagaaagcagcatctatattgagtaaacatgatcctccgatccttctagctaaagttgatgccaatgaggaatcaaataaagattgagcaaatgattatgatttcaggggttatccagactcttaaaattttgagaaatgaacgatggattgtccaagaatacaaaggtccacgtgaagctgatggtattgt

SEQ ID NO: 51008 - DNA, 416 bp, Gossypium hirsutum
  unsure (1)..(416): unsure at all n locations; Clone ID: LIB3197-030-Q1-M1-H12
agagagccgaagggtgggtaggtgtgatactgacnnnannnnctncancagcatgnnnttttnntntttttttnnttttttattattttttattttttactttaaggctccacaatgatcttaccagtggcatgaccatcaatgctcttagcccatgcttcctcagccttacttaggggatactttgaatcgattaccgtcttaagcttcccgtctttcaataagttaaccagataatcgaggttctcctttttaggtgacataaagagtggtaccagcttcttctttgagaaggtaagcttttttatagcacaagttaggaaagcactaagagcattgatggtcatgccactggtaagatcattgtggagccttaatgtacgaaattttactttatacttactgcagtgatgctt

SEQ ID NO: 51009 - DNA, 290 bp, Gossypium hirsutum
  Clone ID: LIB3197-030-Q1-M1-H4
cccacgcgtccgattactttttatttttttcagagcctccttcaccaaactccgctctgttcagcccgtgatcttttgatctttctctatggctaccatttccaagctctctaaccccaacccagacgcttctctttcatcatcttccaaacccagatcttcttcatcgcttaaatgcttcgatgggttccctaccaggcctggcttctgctctaagctggtttcatcttgtaacttgtcctcgctaaacacccaccctttcaggggctccttggttgtcaggaggtctc

SEQ ID NO: 51010 - DNA, 400 bp, Gossypium hirsutum
  Clone ID: LIB3197-030-Q1-M1-H5
gctcaggatgaacgctggcggcatgctaaacacatgcaagaagccctgcaaaggcggcaagaaaatggcctacgatgattaacgctgaagaacctgaccttgggacgcgcacatcttatttgcgggggtcgaaataccccgtacgctgaggagccagaacattcgcaaaggtcttcgaggtgactcagttgttctcatgggtaaaaatacaatgatgaaacggtcggtccgtatgcacgctgagaaaaccggaaaccaggctttccttaaccttatccccttgcttcagggaaatgttggtttgatttttaccaagggtgatttgaaggaagttagtgaggaagttgccaagtacaaagttggagctcctgctcgtgttggtctgggtgcacccattgat

SEQ ID NO: 51011 - DNA, 368 bp, Gossypium hirsutum
  Clone ID: LIB3197-030-Q1-M1-H6
attaggatttgtgtatcttgaaaattatacacacaagcagcatgacctctatgctttattgatataagaataacctctctttcctgtactttaatgtcagctagacattttattattgaagagaacaccaagcttatctgcattccctctcctattttttcttttttggttttggaaggaaacgctttatttattaggaaatacacaaatatgcaggcggtttctactacacaaaatcttaattcttctgtcattcgtccttccaagcctcgccggttccatcagttgactcgctcctttatccgttgcgtttatcacaatgactccgttcaattccctaatggagtcggtttaaaccgcgctgattg

SEQ ID NO: 51012 - DNA, 129 bp, Gossypium hirsutum
  Clone ID: LIB3197-031-Q1-M1-A10
gccaatggaagtcagtcaggtcgcaaagcatcagtatccataagtaaactagatgtcttaagtgccaatgagctattggattcagctctggaaacagcccggcaagttgtaagcttttcggtttcccca

SEQ ID NO: 51013 - DNA, 367 bp, Gossypium hirsutum
  Clone ID: LIB3197-031-Q1-M1-A11
ggcatggcttgacatcgcgtgagcccgatgaaggcatctatatcgttttcacagatatcacagcttggcttgacaaacaactcttataaactttaagcaataaagggttcggaaaactcactaatacgagcattgaaacctggttgcagaacccaatggaatgggttcgttgacatcactaacccacttatcctgatagtaacatattagctactgactctgtatattttctctacattaatagaattaaaagatatgaaattgcttcaatactgcaatgtttgaggatctgattaatttgtttcattgcaaatgctttggtgctgtttttattaagaagagacattgaagttaaaatcgatttatg

SEQ ID NO: 51014 - DNA, 381 bp, Gossypium hirsutum
  unsure (1)..(381): unsure at all n locations; Clone ID: LIB3197-031-Q1-M1-A12
ctttgcaagaagccacgctttccttctcccttgtgttctctgattaattacaatggtcccagcagacatttaacatcacaattattccaaataatagataaatttccaattcattagttcacatcgttagaattcgagagaaacagaaaggattttagctttttgttatatatgattaatggctgcgagtgcgaatccgacggggaatcatcaggaaggttcgtcgaaccagaacgtaacgccttctcctcctccaactgccaatggtcttgccgtcaattcgaacaatagtgggggcaatacatcgaccgccgncgccgccgtctcggctgacacgcagtccgcgttgaagcacaaccctggcatctccctagactggac

SEQ ID NO: 51015 - DNA, 349 bp, Gossypium hirsutum
  Clone ID: LIB3197-031-Q1-M1-A5
cagagaaagaaaagaggaagactgaaaaggaattggaggatgagaatggtggtgctggtgtgtattctgctagtttgaggaagaactatatattggcaaatgatgaatggaaagaggacacaatgcctgaaattcttgatggtcacaatgtgtacgattttattgaccctgatatcttgttaaggcttgaagagttggagcgtgaagagggtcttcgacaagcggaggaggaaggtgatgactttgagatggatggccaagaattatccctggaagagcaagaagcactggctgagatcaggaaaaagaagagcttgcttattcaacagcatatgatgaagaaaagcac

SEQ ID NO: 51016 - DNA, 394 bp, Gossypium hirsutum
  Clone ID: LIB3197-031-Q1-M1-A6
cgggattccaggtgaattcaccatgctcgagctggcggaatccttgaaggagctaatcgatcctgaggtgaaaatatctttggtggaaaacactcccgatgatccccgacaaaggaggccggacataaccaaaacaaaagaggtgctcggatgggacccaaaggtaaagttgcgtgacgggcttcgcttatgaggaggatttcgtcagagctcgggtcccaaaaagactgattgaagttttttacagcacagaagttcaatataagactatgcttttttcttctatataaatccaattttatttcatcatataatgcgaatgagtatttgatttgtttatgttttgacatttgataatgacacatttgcttaaaaaaaaaagcgcgttaagtca

SEQ ID NO: 51017 - DNA, 413 bp, Gossypium hirsutum
  Clone ID: LIB3197-031-Q1-M1-B10
gaaactcccgccacttccctcccacccaaatccgtaaaacgttccattttcaccaattctcccggaaattcacatctcattttctccatcccaaacaaaacctttaccgttgttattgttctacctagactaccgaaaccctaacatttcaaattcaaaggaagggaaccccaaaccatgccgtctttgacttctccaggaaaaatacttcgcctagagcttgagaacttcaagtcctataagggtcttcaaactatcggtcccttctccgacttcaccgccattattggaccgaatggggcgggcaagtccaatctcatggatgcaatcagcttcgttcttggagtccgaactggtcagctacgtgggggccaactcagagacctaatatatgctttcgacgaccgtgaaaa

SEQ ID NO: 51018 - DNA, 415 bp, Gossypium hirsutum
  Clone ID: LIB3197-031-Q1-M1-B11
cccacgcgtccgcaatttcatcctgatggatgtcttgagattatcgataggaaaaaggacattgtcaaacttcaacatggagagtatatatctctcggaaaggttgaggcggcattgatgtcgagcaagtttgtcgacaatttgatggtgcatgctgatcccttccacagctattgtgtggctttgattgttccgtcacgcgacgttcttgagaagtgggcagtagaagctggcataaagtaccaagatttcccagaactgtgtggcaaagctgaaactgttagtgaagtccaaaaatcactttcaaaggtggggaaagatgcaaaactagacaaatttgaaatacctgcaaagattacactgatggcagaaccatggacacctgaatcaggattggtcacagcagcactcaaaa

SEQ ID NO: 51019 - DNA, 396 bp, Gossypium hirsutum
  Clone ID: LIB3197-031-Q1-M1-B12
gttagttttggctttggttcaaaggtagaaaagagaatctagccgccgacaagcatataattttcggctcaaggaaagcacatgagaagatccggtttgagccgtagggaatcaaattcccaagtgtgaattcaaaggtcaagccaagccaatctttaagccaagcgagccatagaaacataatttcctcctctctattttatctgtcgtctctctcggaacttgcttctctatcagataaagcgaaatctgacaaaatcgatggcctcgcgtgacaagaaacctgcgaagccgtcgagcagccgtgccggtggaatacgcacgctctcggatctgaaccggccctctggacccgattccgacagcgattccgatgatccccaggagtactacact

SEQ ID NO: 51020 - DNA, 461 bp, Gossypium hirsutum
  Clone ID: LIB3197-031-Q1-M1-B4
atgcgctgatgcctcgtgtttctgatctattctctacagatgaatcaaatagaaaatccttctggacttcattgtaatcaaaaggcagcaatttcgcattcttctgaggatacccatttgtccaacattcgaaacaacatcttttttttttttgtgggggggggggtgaatggaaccccatgaccatgccttcttatacataacaggaggataacttgatcaaatgctcaatctctatgagagctataggactgtgaatactaataacagctattcttttcctatggactgttcattacagaagaggattggctctcatctctgataacaaagatctcatctttaatgtccatcctgttttaatggtcattggattagtgctcttaaatggtgaagccattctggcatacaagactgtttcttggacaaaaatcttcaaaaagttagttcatcttacagat

SEQ ID NO: 51021 - DNA, 410 bp, Gossypium hirsutum
  Clone ID: LIB3197-031-Q1-M1-B5
gtgatctctgctctatagtcggacattcttctgttaaattttgttcaggctaattaataagttttgggggtgttaaccaggtgtcaaaattaataacaacattcttcacaacttcttttaagtataatggcttaacccgggtcttcctctttctttgccagagaggttcaaatagcaccacaggttgccacagatataactttatttatagggccaacccaatcactgagcccttcagagtcacttaacactacaacaagtctctttatgggtcaaaccccgctcagggtttttgctgctgtttccacattggctgcaatctgtgttatggcaacaagttcccaaaccattgttctatttggattcaccattagagctcattatagctactcatctgctacgaggtttta

SEQ ID NO: 51022 - DNA, 428 bp, Gossypium hirsutum
  unsure (1)..(428): unsure at all n locations; Clone ID: LIB3197-031-Q1-M1-B6
cggacgcgtgggcggacgcgtggggcgagccggccgccaaaacgtgtgcaagtgcatcaaatcggcggtgaacggaattccgtacaccagcaataacctcaatctcgcagccggcctacctgctaaatgtggtctccaactcccttacagcatcagcccctccactgactgcaacaaggtgcagtgaggttgatgatgatgatatggaaggagtggaagaaggttccagctcagctagataaagtagctagctaaggttaaataagctgtgttggtgtgttgttttttagaaaattccatatataatcggggaaagaaaaaaaaatagaaaatgtactttgtaactgtatttcgtatgtgatatatataatgtatcgtaatctttaattttttagtgatgctactacgttntatacgagtctgtaatg

SEQ ID NO: 51023 - DNA, 373 bp, Gossypium hirsutum
  Clone ID: LIB3197-031-Q1-M1-C10
tgaaagtgaaaatggaggtttacagcagaaggctaatggttctggtgtttgcatttgcactagtaagcatagggtacgcgcaagagtcgaactcgaccactctggttccagcaatactgacttttggtgactcagtggtagatgtgggcaataatgattatctccccaccatcttcagggctaattaccctccttatgggagggacttcgccaaccaaaagcctactgggaggttttgtaatggcaagttggccactgacatcactgctgaaactctggggtttactacttatccaccagcatatctaagccctgaagcatcaaggagcaaccttcttattggagccaattttgcttcagctggatctggcta

SEQ ID NO: 51024 - DNA, 433 bp, Gossypium hirsutum
  unsure (1)..(433): unsure at all n locations; Clone ID: LIB3197-031-Q1-M1-C11
atttctcttgccaatttacagctgatcttttggcaatgaaccatacagatttcagcatcaccagtactttccaggaaattgcaggaagcaaggacactgttggtcaatacgagagccacactgctttcactcttcctggtctctaccgtgttgtacatggtatcgatgtgtttgatcccaaattcaacattgtttcccctggtgctgatatggagatatacttcccttacaccgaagagaagcggaggttgaagcatttccatactgagatcgaagaccttctttacagcaaagttgagaatgaagaacacttatgtgtgctcaatgaccgcaacaagccaattctgttcacaatggcaaggcttgatcgtgtcaagaacttaaccggactcgtcgagtggtacggcaagaacgcanagtcgcgtgagttggc

SEQ ID NO: 51025 - DNA, 402 bp, Gossypium hirsutum
  Clone ID: LIB3197-031-Q1-M1-C12
gtgtttttgaaaagaaatctcgagaacctctcgtcattctctatttcctccgtgaaagctgctgttgtgctgatccaagtgataaaccagtgtaaagatgagcgttgttgggtttgattttggcaatgagagctgcattgttgctgttgcaaggcagagagggattgatgtagtgcttaatgatgaatcaaagcgtgaaactccggctattgtgtgctttggggagaagcagagatttattggtactgcaggggcggcgtcttcaatgatgaaccctaaaaattcaatttctcagattaaacggttgattggccgtcaattctcagatcctgagttgcaaagggatatcaagtcgttacccttcaatgtcactgagggccctgatggataccctctgattca

SEQ ID NO: 51026 - DNA, 265 bp, Gossypium hirsutum
  unsure (1)..(265): unsure at all n locations; Clone ID: LIB3197-031-Q1-M1-C2
caatgatgcaacaacaacagatgatgatgatgtatcctcctcatcattacatggcttataataaccctcattntcattatcaacaacagtatcaacaacaacagttgcataaacaacaacaaggatctaattcagatgaggttaaaacgatctgggttggtgaccttcttcattggatggatgaaacttatcttcatagtttcttctctcaatctggcgaggtttcgtctataaaaatcatacgaaataagcaaaccggacagtc

SEQ ID NO: 51027 - DNA, 462 bp, Gossypium hirsutum
  Clone ID: LIB3197-031-Q1-M1-C4
gtatcctcaaaatacctaagtgattctctctgcgccgaccgtttcatcatcatctgcccctctctccctctttttgcatacctttcagaagggctcacaccttcaaaacacagggagggacaatctcaaaagataatggaagatttgataacaaaatttcaaaatgaaatattcttttttccccttctttttcccaaaatcgattccccccacttttttttcccaaaccctttctcccctaccccgattccctttatttttccccccaatttccccaaatcggcagcccttcttttatttttcccaaaccatttctcccctaccccgattccctttgtcacctcctttctccgaccacccaaccttcgcctcatctctccgcttccaacgttactttctccttttctattccctcgcctcagtgtttggaggattatggtctgtgtacagagagtttgagct

SEQ ID NO: 51028 - DNA, 374 bp, Gossypium hirsutum
  Clone ID: LIB3197-031-Q1-M1-C5
gttcagttcttctcggtttcacctttagcaagctcattgatacattgggttggaggaattgtgtacatgctacaaataagcatctttgtcagccttcttcgaggggtattacgaaacggagttctgtacttcctgcgagatccagccgatccaaactacaacccttttcgtgatttaatcgatgatcctgtacacaagcatgctccgagggtcttgatatctgttgcctgctatgggagtctgatagtgatgctggtatttttgactgtcaagcttgctatgaagatggagccctctattttcccacttgatatatcggtatctgatccatataccgagattccagctgacatgcttgtatttcaaatatgcat

SEQ ID NO: 51029 - DNA, 268 bp, Gossypium hirsutum
  unsure (1)..(268): unsure at all n locations; Clone ID: LIB3197-031-Q1-M1-C6
gtgagattgaagaacctggacatagacacaatgcaggcaagcgtacacggtgtaaggcgggtggaatggtattccgaaggaatagtggaaaatgtaatgagagggagcgtttcctgcgagtgaagctctaatatatgtatnctttattaccttaatcccgtccgccattttacaagggaaaggttatttgttatggcattttatgtttatattagtagtaaaaaaccatgtgttttgcttttgttgtagtaaanaaaaaaaaaannaa

SEQ ID NO: 51030 - DNA, 264 bp, Gossypium hirsutum
  Clone ID: LIB3197-031-Q1-M1-C8
gtgggaggaaatattgatcaagatattgcatggggatttcaaaactatacctagggtgatgggttgtatgaaaatgttgatctgaaaggggaaaaggctgacatggagcattcttgtgtggaacagatatgcgaagatgaagatgagatctgaaacattagcttaaagaagaaccttgttttgagttcacagaacatggcatgtcaagatgctgtgcataatgctgactggaaagatcaaaattgttgagagaagtgtgatcaa

SEQ ID NO: 51031 - DNA, 442 bp, Gossypium hirsutum
  Clone ID: LIB3197-031-Q1-M1-C9
cctttttcttcttcgttttcgcttccgtgtggttttctcaggattcaggttttcaagctgagaaggaggaatctgatgggtcaattaaagatctcggccgccgcggcatgattgtttcaaagaactccgagaatggtgtagtagacgagaaggtcggtaccgattccataggtactaatcttggtttcgatccagctggtcttggcgtccttgatgcattcgttgcaagtttttccatgataattgtcagtgagattggagatgaaacttttataatagccgctcttatggctatgcgacacccaaagtcaactgttttatccggcgcattagctgccctgtttgttatgactgtactttccactggactaggtaggattgtgccgaatttgatatcaaggaagcacacaaatagtgcagctaccagtctctattgcatttt

SEQ ID NO: 51032 - DNA, 432 bp, Gossypium hirsutum
  Clone ID: LIB3197-031-Q1-M1-D10
gccaattgtttgagctagctagctcttactcgaatggcaaccaaaacgatgatgttgcaaatattttcacttttcttctttttgttcagtatctgcaactccattttccttggtgctaatggagatgacaatggtggttggcaaactgcccatgccaccttctacggtggtgctgatgctaccggcacaatggggggagcttgtggttatggaaacctgtacagtcaagggtatggaacgagcacagcagctttgagcactgcacttttcaacaatggcttgagctgcggtgcctgctacgagctccggtgcaacaatgatcctcaatggtgcattagtcgaaccataaccgtgacagccaccaacttttgtccccctaactatgctttatctagtgacaatggcgggtggtgcaatcccccacgagaacac

SEQ ID NO: 51033 - DNA, 428 bp, Gossypium hirsutum
  Clone ID: LIB3197-031-Q1-M1-D11
aagaaacaacacgatgcatgcgatggtgttgggcttttgggtattgcttgggcttttggtggcatgattttcattcttgtttactgcaccgccggtatctcaggtggtcacattaacccggcggtgacatttgggttgtttttggctaggaaggtgtcgcttataagggcggtggcttacatggtagctcaatgtttgggtgctatttgtggtgttgggttagttaaggcattcatgaagagtgaatacaactcccttggcggcggtgctaacacggtggcgactggttataacaaagggactgctttgggagctgagattattgggacattcgtgcttgtttacactgttttttcagctactgaccctaaaagaagtgcccgtgattcacatgtacccgtgttggctccacttcctataggatttgc

SEQ ID NO: 51034 - DNA, 383 bp, Gossypium hirsutum
  Clone ID: LIB3197-031-Q1-M1-D12
atttcttccggtgcaaagagcagcagccatgggtctcaagacggagctttgccgattttggtgccaagatataccctgggaaaggcatcagatttgttcgtggtgattcccaggtcttcctcttttccaattcaaaatgcaagaggtacttccacaaccgcctgaagccatcaaaacttacatggacggccatgtacaggaagcaacacaagaaggacattgcccaagaagctgtgaagaagaggagacgtactgcaaagaagccatactccagatccattgtgggtgccaccttagaggttatccagaagaagaggagtgagaaacccgaagttcgtgatgcagccagggaagctgctctccgagaaatcaaggaaaggatc

SEQ ID NO: 51035 - DNA, 88 bp, Gossypium hirsutum
  Clone ID: LIB3197-031-Q1-M1-D2
cggacgcgtggggcaaagcaaagcattagcagcgagagccatgctttcttaaccaaaactctcttctatgtctaatccttttcctttt

SEQ ID NO: 51036 - DNA, 419 bp, Gossypium hirsutum
  unsure (1)..(419): unsure at all n locations; Clone ID: LIB3197-031-Q1-M1-D3
tgtcatctctgcggttcccagtggaaaaggtgagggcggatagagttgttctgatgatgagaacantggaaaataaaaaaaatcaaacggttggcatttcggacaggcttagacctcggaaaagcagaaagtaaacagaaaaggcaagggcagagaatgggtgttgaggaagaaggatcagatgagaaagaaagggaatgtcgtgccccctgacacgaagtacactgctcgaaaaacgaagctcatttctaaccagctacgatattatagatctgaaagtttgggatgaactagtttacatatttcatggtttattatcactttgaaaatcatagttaactataatggttgattaaggtttggttcttgtatcaatacatacnatngtgttttgttttaagaaaatattgatatatata

SEQ ID NO: 51037 - DNA, 436 bp, Gossypium hirsutum
  unsure (1)..(436): unsure at all n locations; Clone ID: LIB3197-031-Q1-M1-D4
gtacaagggccctactcttcttgaggctcttggccagatcaatgagcccaagagggcttcanacaagcctctccgtctcccacttcaggatgtgtacaagattggtggtattggaactgttccagttggtcgtgttgaaaccggtgtcttgaagcctggtatggttgtgacatttggcccttctggtctgacaaccgaagttaagtcagttgagatgcaccatgaagctcttacagaggcacttcctggtgataatgttgggttcaatgttaaaaacgttgctgttaaggatctcaagcgtggttttgttgcatccaactccaaggatgaccctgctaaggaggctgccaacttcacttctcangtcatcattatgaaccaccctggacaaattggaaatggatatgctccagtccttgactgccacacatcacac

SEQ ID NO: 51038 - DNA, 443 bp, Gossypium hirsutum
  Clone ID: LIB3197-031-Q1-M1-D5
caatggtgtgcatacgcaaggcgaccatggacgacctactggctatgcaagcttgcaacttgctttgccttcccgagaattaccagatgaaatactatttctaccacatcctctcttggcctcagcttctttacgtcgccgaggactacaacggccgcatcgtcggttacgtcctcgctaagatggaggacgaaagcaacgagtgccacggccacattacctctctcgccgtcctccgcactcaccgcaagcttggcctcgccactaagctcatgaacgccgcccaagccgccatggagcaggtgtttggagcagagtatgtgtcgctgcatgtgaggaagagtaacagggcagcgtttaatttgtatacccagacgttgggatataagattcatgatgtggaggccaagtattatgcagatggggaggatgcatatgacatg

SEQ ID NO: 51039 - DNA, 487 bp, Gossypium hirsutum
  Clone ID: LIB3197-031-Q1-M1-D6
ctcttttctcagctccgattcttcaaaccctaggacccccccttctctaatttcatctgatcgatcagttctttaagcttcacaatcccaatcccaatcccatgctcttttcccttttttcctaatatttcttttcccgggaaaaacttgagaaatccgagaacaattcttttgttttggaaagaagtcacattaagaaatcgagggaggagaaaaggaaggagggaggagcctgtaaaataagaagatttgtgaaaaaaatggccctcgaccacaaacgaggttcgggtttacaatcaacgttcatcgaaagacgtcattcaacaaggggttcgcgaagagttcatccaacaacggtgtgacctggcgaagctgtcctcaacgaactccaaagaatttgggaagcgaagatgatgcaagcgggagtaatattgggtccgatagagaggtcttcgcagaagcagcctactcccggtagcgcaattac

SEQ ID NO: 51040 - DNA, 375 bp, Gossypium hirsutum
  Clone ID: LIB3197-031-Q1-M1-D7
caaaatcaaaattacaataaaactcgagatacgcacagcgaaattcattcttcgatctttgaacgccggcggcgaaacaccgctctgtttaccggtgacgtcgttttgttcagatatctgaaagatgtccggtcaatcccagcgcttgaatgtggttccaactgttacaatgcttggaatcatgaaagctcggcttgtgggtgctacaagaggtcatgcacttctcaagaaaaagagtgatgcccttactgtacaatttcgtcagatccttaagaagatagtatctacaaaagaatcaatgggagagattatgaaaacctcttcattttccctaactgaggccaagtatgttgctggtgagaacatcaagcatgt

SEQ ID NO: 51041 - DNA, 427 bp, Gossypium hirsutum
  unsure (1)..(427): unsure at all n locations; Clone ID: LIB3197-031-Q1-M1-D8
cccacgcgtccggttaatacttatcgccgaacgtttacaaccaaatccggtaagaaagtcagtaaggctcccaaaattcagaggttggtgactcctttgaccctgcagaggaagcgtggcagaattgcagagaagaagaagagagttgcaaaggccaaggctgatgctgctgagtaccagaagctgcttgcccagaggttgaaggagcagcgtgagcgcangagtgagagcttagccaagaagagatccaggctctctgctgcttctaagccttccattgcagcttaactgtggntngggcattttgtcagtagttgaatgtttgattctgaaacccgttttatattgtgaggtcattttgattatcaaatttctagagtctgccgatggtttttggggtattgttttttagtggatagtttacatg

SEQ ID NO: 51042 - DNA, 411 bp, Gossypium hirsutum
  Clone ID: LIB3197-031-Q1-M1-D9
caaaaacccggaaatgtcggacgacgatcatggtttcgaatccaaggctgatgccggcgcatccaaaacctatcctcagcaagccggtactatccgtaagaacggctatatcgtcattaaaggccgtccctgcaaggttgtggaagtttccacctccaagacggggaagcacggtcatgctaagtgtcacttcgttgggatcgatatcttcactggcaagaagttggaagatattgttccctcctcccataactgtgatgttccgcatgtcaatcgtactgactaccaattgattgacatttctgaggatggatttgtgactttgctgactgagagtggtgacactaaggacgatctgaggctcccaactgatgagaacttgttgaaacagatcaaggatgggtttggtga

SEQ ID NO: 51043 - DNA, 456 bp, Gossypium hirsutum
  Clone ID: LIB3197-031-Q1-M1-E10
gttgaaataaagagtcaccactcaccatgtccagtatagttggaatctatttgcatctgatctaattgttggtggatacacacacacatacatgtagcttttagctttgaaatgtctactggagttcaacatcaagagagagtaccaatgaacctaaagaaacaacttgctcttgctgtgaggaacattcaatggagttatgcaattttctggtccatttcaactagacaaccagcggtgttagaatggggagatggttattacaatggagatataaagacaaggaaaacagttcaagctgtagaactcaacactgaccaattgagtttacagagaagtgagcaactgagacagctttatgagtctctttcagctggtgaaagcagtcctcaagctaaaagaccttcagcagcattatctcctgaagatcttactgatactgaatggtattacttg

SEQ ID NO: 51044 - DNA, 377 bp, Gossypium hirsutum
  Clone ID: LIB3197-031-Q1-M1-E11
ctagttctagatcgcgagcggggtgattgcgtgattgagccaggctatcgtggtcgtatctacagagatgaatctgattcagatgactcttttggcaatccttttgatgatgattttattcggctagactcttctgttcacatgcatggtagattcatggactatgacctatatgaagaggatgactttgggatgcgccgtgctttccgtgctgttcccccagtagctcgaacttggcctgctcgcttgttgggttcagtgggactaaggcgtatccccagggtccgaggacgtaatggtggccgataacttccatccacctttttcttatctgcaattcagaatacctaaatctatttgaagcttgccatcacaag

SEQ ID NO: 51045 - DNA, 431 bp, Gossypium hirsutum
  Clone ID: LIB3197-031-Q1-M1-E12
aatcatcaaatttctctcaggcttttcatcgagcaggagctatgatacggctgttcaaagtaaaggaaaagcagagagaacttgctgaaaacgcaaatggcggatcacctatcaaaaagcaatctgcaggggagttgcgtttacacaaagacatttctgagctgaacctgcctaaatcatgttccatatcatttccaaatggaaaggaagacctgatgaatttcgaggtttcaattcgacctgatgaaggatattatttcggtggcacatttttgttctccttccaagtttctcccatctatccgcacgaggcaccaaaagttaaatgcaagaccaaggtctaccatccaaatattgacttggaaagaaatgtttgcttaaacatcttgcgtgaagactggaaaccagtgctaaatataaacactgtaatc

SEQ ID NO: 51046 - DNA, 455 bp, Gossypium hirsutum
  Clone ID: LIB3197-031-Q1-M1-E2
ccggccgatgccggtcacccaccgtcgattgttttcttcttcatcttcttctatcttgcttataatctacacagcagtgacgtcagccggcgccgccgccgccaccatcaaactctccctctctcccttccctcacccttcttcctcccatccttaccaaattctcaacaacttagtcacttcttctgttgcaagagcccaccacctcaaacaccccaaagccaaggccgataatactacctcttctcttctcagggcttccctatttcctcacagatatgggggctacactatctccctcaaatttggaactccgcctcaaacccttcctttcattatggacactgggagcagcctctcctggttcccttgcacctctcgttacctttgttcccaatgcgctttccccaatgttgaccctgcaaaaatccccacttttgcccctaaacgttcat

SEQ ID NO: 51047 - DNA, 449 bp, Gossypium hirsutum
  Clone ID: LIB3197-031-Q1-M1-E3
ctctttctaaaaataaaacaaaatattaattaggatatatggcaggtgattcagggaagaaggaagagatgtcaaaggtgaaaatcatcagcacaagtcatgtgaagcctggaaagatgataggaagaaaagaatgtcaattggttacttttgatctcccatatttggcattccattataaccagaagctgttgttttacaagtgtggggagtttgaggagaaggtggaaaaactcaaggatgggctgagagtggttttggaggagttttatcagctagcaggcaagcttggtaaagatgaggatggggttttcagggtggaatacgacgacgatatggacggtgtcgaggtggtggaagccaccgccatggagatcggcatcgaggaactggcggctgaagacggcactgcctctttcaaggacttgataccctacaatggtgttctg

SEQ ID NO: 51048 - DNA, 464 bp, Gossypium hirsutum
  unsure (1)..(464): unsure at all n locations; Clone ID: LIB3197-031-Q1-M1-E4
tctcgatcccctggttgaaacggtaaatgcagctggaaatttgtaaaagttgaagtgggtattagcccaaggagaaaaaacanaaattattcgtccagaatttgtttggtttagtggatttgggattgacaganaagtagaagtaaatggtgttttgggaaggatatgtgagtgatgaagcaatggggacagttgccccggttgttgtatattggttgtatgctgggttttatcaactcttaccacctttggataagtaccgtttacatactagaaaagaggaggaagagaagaatgccgtgcctttcgtttcagttgttaggggtgttctatttcaacagcttgttcaagcaactgttgctaaattgctctttctgttgacatcaacggcagatgcatctgggaccacaatccagccttcagttcctgttcaacttgcgcaatttattgttgcaatgcttgtc

SEQ ID NO: 51049 - DNA, 416 bp, Gossypium hirsutum
  Clone ID: LIB3197-031-Q1-M1-E6
caacaatggcctctacttcaactctcactctggctgaggctctcctagctcgagccatcttttccgatgggtccatccaatcctccgactactgtgtgtcactttcctatttggaaaaatcagtcaacccgatcagattcttagctatcgatgctgtcgaaaaggctaattccggtcacccttggttacccatgggttgtgctccgatgggtcacattttatacgatgaaatcatgaggtataatcctaagaacccttattggttcaaccgtgatcgtttcgtcttgtctgctggtcatggttgtatgttgcaatatgctctgcttcaccttgctggttatgatagtgttcaggaagatgatttgaagaattttcgtcaatggcaaagcagaacaccaggacattctgagaatttg

SEQ ID NO: 51050 - DNA, 369 bp, Gossypium hirsutum
  Clone ID: LIB3197-031-Q1-M1-E8
ctgacgcgtgggccaaaactcaaatccctaggtgaccaccacttccaccgtccagttgtccgtcggccgatccacctcctagcctcaagctcagctcagcagcttcttcatttttgcttcttcatttgcagtctcggtagccgatccagttatctttcagcttcttcatttgctgtcttcttcaagcttccgaatcggcttttagcatgggtaagaaagttatcacacctttgaggagttcacttaagccaaaaacggttcaagccgttgtttgcttggatgattggatgcgagctaagggattttcaacagaaattggttccaaaaatgatgaggacgctgaggacgatgtttcttcgattgcttttt

SEQ ID NO: 51051 - DNA, 408 bp, Gossypium hirsutum
  Clone ID: LIB3197-031-Q1-M1-E9
cttaatttttcattattttccatttttaacggagttttattttattttatttatttttctttctctgccatgtcaatggcgggggagacggggatggagcaattaacgtcgggagcaagcaatcgtataattcccatcttaagaacgctaagaataccgctcattttccttcaatcaataatactgtacctcctcctcttcctcttccctcgccgacgccagacggcggtcggagctgccgatgaggcgccgcagttgcaggctaaaaccgcgaggcggaggtcggtatggaggcgggaagaggaggacacgttgagaaggagagctttagcggagggttgggacatggggttcgaaaccgccgacggagaggtccggtgtcgattgggcacgttcctgttttttggg

SEQ ID NO: 51052 - DNA, 467 bp, Gossypium hirsutum
  Clone ID: LIB3197-031-Q1-M1-F1
gaggatggaaaatttttaaatccagtgctgatgctatataaagtgtgaaggaggttatgaaagttgtcattgggttgaaaaggtttccatcctccttaccaatcaaggcactgtgcttgtagccgaagtaatttcttttcttctccttttgtgctgaactcctctgggtagagttatgtcagggtctgaattgtttcttaatgcagtaacttgatgcaaaagagcattactatagttccactctgagatacgcaaaagttgacttgtatccaggactttgtgcattctcccctagtttggagggttgcttcttggctcttcctgccaccacggccaaaagagctgtattagtgtacaatgtcatggagcttcagttgcattgtgagatgctcaccggtctcctttggctgcaattgccttatcttccaatgggaaatacattgcaacagcatctgaacaaggaacta

SEQ ID NO: 51053 - DNA, 432 bp, Gossypium hirsutum
  Clone ID: LIB3197-031-Q1-M1-F10
gtttgagctagctagctcttactcaaatggcggccaaaacgatgatgttgcaaatattttcacttttcttctttttgttcagtatctgcaactccattttccttggtgctaatggagatgacaatggtggttggcaaactgcccatgccaccttctacggtggtgctgatgctaccggcacaatggggggagcttgtggttatggaaacctgtacagtcaagggtatggaacgagcacagcagctttgagcactgcacttttcaacaatggcttgagctgcggtgcctgctacgagctccggtgcaacaatgatcctcaatggtgcattagtcgaaccataaccgtgacagccaccaacttttgtccccctaactatgctttatctagtgacaatggcgggtggtgcaatcccccacgagaacactttgatt

SEQ ID NO: 51054 - DNA, 335 bp, Gossypium hirsutum
  Clone ID: LIB3197-031-Q1-M1-F11
attccatctcttctcctttaatccctaaattttcatccccaagttcccaacccagttgccaccgaagacgctgaccggaccacctggtgcatcgccctcgactaacctctctgctgcgtcgccgtcgcctgctcatcctactcagaaacgagattatatttttcacaacagtaaattaaatgggaagcgccatgtacgaccttactactttgagttcgtctctcatgttaataaacgatgggaaggtaaaacaatagtggatttgttcgctcaagagttcagaagtcgatctagagattactatattatttttctagaaacaatatgcaacgatg

SEQ ID NO: 51055 - DNA, 326 bp, Gossypium hirsutum
  Clone ID: LIB3197-031-Q1-M1-F12
gttttgaatctagggatttgcgggtggagaagacgagagctcatctctctgcttcaaagctcctgtccaggtagaattctcttcttcctttgcgttgtgttctttgttgttcagtcgccatggcttcaaagcggattttgaaggaactcaaggatttgcagaaagatccacccacttcttgcagtgctggtccagtagctgaagacatgtttcattggcaagcaacaatcatgggaccctcagatagcccttatgctggaggtgtgtttttagttaccatccatttccctccagattatcctttcaagcctcctaaagtcacgttt

SEQ ID NO: 51056 - DNA, 428 bp, Gossypium hirsutum
  unsure (1)..(428): unsure at all n locations; Clone ID: LIB3197-031-Q1-M1-F3
cttaatttaaaaaaaagatggctttggaaatgtggggcaagtctncatgagggtgcccctaatgttcttgaaaactgtccattctcccgaaaagctcttcttactttggaggaaaaaaaaatttcctacaacatgcaccttatcaatatcagtgacaaacctcaatggtttttggagataagtccagnaaggaaagtaccagtggtgaagtttgatgacaaatgggtggctgattctgatgtaattgttggaatccttgaaaaaaaatacccttcaccttgtctcaaaacccctcctcaatttgcctctgttggatcaaacatatttggaacttttgtcacattttttaagagcaaagacgctaatgatggatctgagcangctttgcttaatgaacttcaagcatttgatgaacatcttaaagcaca

SEQ ID NO: 51057 - DNA, 456 bp, Gossypium hirsutum
  Clone ID: LIB3197-031-Q1-M1-F4
gctggtttttgctgtctccaactcttgttcatagtggagagcaatgtaagctatgagctacctgatggacaggttattaccattggggctgaacgattccgttgtccagaagtcctcttccagccatccatgatcgggatggaagctgctggcattcatgaaacgacatacaactcaatcatgaagtgtgatgtggatattaggaaggatctctacggaaacattgtcctcagtggtggcaccactatgttccctggaatcgctgacaggatgagcaaggaaatcacagcattagccccaagcagcatgaagattaaagtggttgcaccaccagagaggaagtatagtgtttggataggaggctccattttggcatccctgagcaccttccagcagatgtggatttcaaaggcagagtacgacgagtctgggccatcaattgtgcacaggaaatgc

SEQ ID NO: 51058 - DNA, 418 bp, Gossypium hirsutum
  Clone ID: LIB3197-031-Q1-M1-F5
tctctctcatatggcaatgtggtgcaggtattcggtacaggcagaagcgagggtaaggagaacccatttacagccaaagcctcgttgattcgttactggaacaatcacatttccaacaatcttcccaagccaccatttcttatctccaaagcttccccactaaacgccattgacttggccaagctcactcaacttgccaatcataactctctgtcttcccacattgaatctttttgttccttagccaatcttttctgctcattccaggaggaatcctcgaaactagacgcagttggcaagggtaaaggggatgcaaacttcgcagtgtattccagtaaaaactttaaaggttatggctcgttaagtcgcggagggatcgactccttcaagaactactccgatggggtaaatactccca

SEQ ID NO: 51059 - DNA, 152 bp, Gossypium hirsutum
  Clone ID: LIB3197-031-Q1-M1-F6
tgaattttgagtttgtcttgttgatttcatttagttttgttttgaaattttctgtggggtctcttatttctcaattgtaattgtgaattttgtggcactttcttcctcctttctctttttaagattttgcatcattgcatttttttttaaca

SEQ ID NO: 51060 - DNA, 407 bp, Gossypium hirsutum
  Clone ID: LIB3197-031-Q1-M1-F7
agaaaaatgccgccaccaggatggggaccggcgccaggaggaccgccggggcctcccggtttatgtggctgctttgattttatttgcggtggtatttgccgtcttctttcttcttgtttttatgttctctgctgctgctgcatatttgaaagctgctgtgggccaatgttcggcgggccgcctgggccacctgggccaagacctttttaattatagtgctcatctctttttcccttttactctgtttttgatttgtgttttaggctgttgtgaactgtgatgtgaaacaaaaatctagttctgcccctttctgttctttcttgccagcatggaacatggttccagtccacgcttttattttgtctaaaataaaaaaaattagttaaaatatgctttaaattttctat

SEQ ID NO: 51061 - DNA, 321 bp, Gossypium hirsutum
  Clone ID: LIB3197-031-Q1-M1-F8
gtcgtgatctaaccgatgccttgatgaagatggttaccgagagaggttacatgttcaccaccactgctgaacgggaaattgtccgtgacatgaaggagaagcttgcttatgttgccctggactatgagcaggaactggagactgcgaagagcagctcatctgttgagaagaactatgagttgcctgacggacaagtcattactattggagctgagagattccgttgcccggaagtcctcttccagccatctttcatcgggatggaagctgctggaatccatgaaactacctacaactctatcatgaagtgtgatgtggata

SEQ ID NO: 51062 - DNA, 403 bp, Gossypium hirsutum
  Clone ID: LIB3197-031-Q1-M1-F9
gctttgatatcgatgctaatggtatcttaagcgtctctgccgaagacaaaaccactggacaaaagaacaaaatcaccatcacaaacgacaagggccgactctccaaagaagaaattgaaaagatggttcaagaagcagagaaatacaaatccgaagatgaagaacataaaaagaaggtcgaggcaaagaatgcattggaaaactatgcatacaatatgaggaacacagttaaggacgaaaagattggtgccaaactcccagcaactgataaaaagaagatcgaagatgctattgaacaagccattcaatggctagacagcaaccaactcgccgaatccgatgaatttgaagacaagatgaaggagttggagagtatttgcaaccccatcattgctaagatgta

SEQ ID NO: 51063 - DNA, 469 bp, Gossypium hirsutum
  Clone ID: LIB3197-031-Q1-M1-G1
gaccccgggggacccgaccccgaattccccgtctaaccacacccttccgctcttttctggtcacctcaatttcaagtgaaggcgtattgtttataggaaaagactcacattaacattgtggtcattggccatgtcgattccggaaaatcgaccaccactggccacctgatctacaagcttggtggtattgacaagcgtgtgattgaaaggtttgagaaagaagctgctgagatgaacaagaggtcattcaagtatgcttgggtgcttgacaagctcaaggctgaacgtgagcgtggtatcaccattgatattgccttgtggaaatttgagaccaccaaatactactgcactgtgattgatgcgcctggacaccgtgactttatcaagaacatgattactggtacctcgcaggctgactgtgctgttttgattattgattccaccactggtggttttgaagctggtatct

SEQ ID NO: 51064 - DNA, 344 bp, Gossypium hirsutum
  Clone ID: LIB3197-031-Q1-M1-G10
gagaaacttgaggggaagaatcttgctatccggtgcttttctctcgcaaaaaattctcaaacttgtttttaacgttcgctgaatactatcgctcatttcttccctcagaaccctaatcgataactgaagccatttaatcatgtttgggcgtgttccaaaaaaatctgataacactaagttttacgaagtacttggggttcccaaaagtgcaagtcaggatgaattaaagaaggcttataagaaagctgcaattaagaatcatccggataaaagtggagaccccgagaagtttaaagaactggctcatgcttatgaagtacttagtgacccagaaaagaaagaaa

SEQ ID NO: 51065 - DNA, 430 bp, Gossypium hirsutum
  Clone ID: LIB3197-031-Q1-M1-G11
attatttttgctctctctttgtttttgagatctgtgtgtttcttcaagcttcttgaaagcgtcattttggttgagaactggaaaccgctgctgtgatggctccaccaattgagactacagtcaagtcctctgactctcactgcgctccacatcctcctttgaatgaaaggatcctttcgtcaatgaccaggaggtccgtcgctgctcacccatggcatgatcttgaaattggacctggagctcctacggttttcaactgcgtgattgaaattgggaaagggagcaaggtgaaatatgaacttgacaagaaaactggtttgatcaaggttgatcgtgtgctttattcatcaattgtgtatcctcacaactatggtttcatccctcgtactctttgtgaagacaatgatcccttggatgtcctgattattat

SEQ ID NO: 51066 - DNA, 413 bp, Gossypium hirsutum
  unsure (1)..(413): unsure at all n locations; Clone ID: LIB3197-031-Q1-M1-G2
cccacgcgtccgtctgtttcgacgatcaaatgtccgaaatttctctgtttgtctgcggatccctctttctacatctcaacatctncaataaccagtttgggaaaagaaaaaaaaaagagagatctttaatctatcttatgagatttcattgaagaaaataaagtacccagaaaaagaaaaaaaaaacgatatgtatagcaatttcaaagaacaagcgatagagtatgtgaagcaagcggtacaagaagataatgcagggaactacagcaaagcctttcctttatacatgaacgcacttgagtatttcaagacccatttgaaatacgagaagaaccccaaaattagggaagctattacccagaaattcaccgagtatttacgccgtgccgaggagatccgtgccgttctcgatg

SEQ ID NO: 51067 - DNA, 417 bp, Gossypium hirsutum
  unsure (1)..(417): unsure at all n locations; Clone ID: LIB3197-031-Q1-M1-G3
cttactcttgggcttttcttcagaaagaaatggcgggggattatccagttgtcatgggccattttacttttgggtgttggaattgcaactgtgactgatatgcagctcaatatcctgggttctatcctttctctgctgggcagtgtttacaactngcatagctcaaattatgactaatacaattcagaagaagttcaaagtatcttcaacccaacttctctaccagtcttgcccttaccaggcattaactctgttcatcattggcccattcctggatgggcttttgactaacaagaatgtttttgctttcaagtatacccctcaagtgctgttcttcattgttctttcctgcctgatttcggtctctgtcaactttagtacatttctggtaattggaaagacatcccctgtgacata

SEQ ID NO: 51068 - DNA, 383 bp, Gossypium hirsutum
  unsure (1)..(383): unsure at all n locations; Clone ID: LIB3197-031-Q1-M1-G4
cttactcgttcgcatgggataccagtcctggggtgggcacatcaaggggactaagtgagcaatgctnangtgatagangcaggtggatgggggctttgtatgaagagctgggggtggggatcgaaccatttggtgaagggtgttgatattgtggacaaaatcaaggagctgatggggaaccaaaggatgaaaatggaatgtgcaaggatcagtgaagtggcaaaacaaaggtcaaaggctggtgagggttgtgagaatatgctgaagacacttttccagagcttgacgaagagctgaagaagggaattttgtacgaggactggttaattaattgattatctgttgaatttttctgttttaagatgaataagtaaaatgcttct

SEQ ID NO: 51069 - DNA, 460 bp, Gossypium hirsutum
  Clone ID: LIB3197-031-Q1-M1-G5
ctttcattagcggcaaccatataacttactcggccgggtgtgatgcacttagacaggtgaatttgactggtctttctcatggattaagtttccaagagacgaaagatctgtgggtccaagccgatgctgatggaaatggtgttgtagactatgaagaatttaagagaatttgggatgctacatggttacaacatatggatgaagactgcagcttagaggacttgaatgaaggcattgcagaagacgaagctatcggttttgcggtaaagaaagcagttctcttcccccatgaagtggagaagggaatatggcctgaaaactactccctttctgatcatgcccgactcactgctgtattctcacctgttagattacggtgttcgaagcaaagcttgtagaataaaatggtgatagcttcacagaaaacaagttctgttacacatttaaaaggaaaaataca

SEQ ID NO: 51070 - DNA, 278 bp, Gossypium hirsutum
  Clone ID: LIB3197-031-Q1-M1-G6
tcgacccacccactccggttaaaagctgtgggtgtctgcttcgttcagtggttgatttttcttatagagtaaaatggagatcaaaagtgtacatggacctttctattttgaactgaacacaggagctaagatgccatgtattggtttagggacatgtaaagctccttctggtgtcgttggtgaagctgtcgttgctgcagtcgaggctggttataggcacattgattgtgctcatgtttatgataatgaataggagattgggcttgcattgaatggac

SEQ ID NO: 51071 - DNA, 407 bp, Gossypium hirsutum
  Clone ID: LIB3197-031-Q1-M1-G7
cggacgcgtgggcgcaaatccaggggctttttgagaccagttttccctattacctgcctctcttgtttggctgcttcctgtccttcgattcattttttttttgtttctctgtgtttttattgcaaaagacttggatttattcttcaatagtcacttctgggttgaatcaaagtctaacaaaatgccgtggtctttcgtcaactgcgtgcgcttagttgttttctttcttgtcatactgtaattttatttgtttctggtgaatttcgattgaattttaaaggggatacggttccttcaactttcgtttgcaattggaaaattttgggttggaggtgtgaggatgtacatttcggtaaccataaagagatatcgagcaattaaggaagttgggaaaattaaaatgagcg

SEQ ID NO: 51072 - DNA, 420 bp, Gossypium hirsutum
  Clone ID: LIB3197-031-Q1-M1-G8
caattcccttcaatttctccattttctctgaaggccaatggatccagtaagcagttggggcaattcctccctcgactccgtcgatcccgaaatccatgacctcatcgagaaagagaagcgtcgccaatgccgcggcatcgagctcatcgcttccgagaacttcacttccttcgccgtcatcgaagccctcggcagtgccctcaccaacaaatactccgagggcatgcctggtaaccgttactacggtggaaacgaattcattgatgagatcgagaacctctgcagatctcgcgctatccaggctttccacctcgaccctaccaaatggggtgtcaatgtccagccttactccggttccccggccaacttcgctgcttacacggccgttctccagcctcatgataggatcatgggactcga

SEQ ID NO: 51073 - DNA, 326 bp, Gossypium hirsutum
  unsure (1)..(326): unsure at all n locations; Clone ID: LIB3197-031-Q1-M1-H1
ccggtccaaccacaccgtccgttttttcttggccggacccatgggtcctggggtggaaggtatttatcgaggaaatgggcagagatactaaggatcctaataattggacaacatatagcaatataccatcaanttatgttgatcccggcttgtttgagaaggcataaaatgcacttaaaggaattggaaaagaaaaatgcccacagaaatctttctgctttccagtttctaattacattgtatggccgaattggaaatttgcatgaaatttatcgaatatggcgttcattgaggctctcttttcacaaaacagccaatataaacta

SEQ ID NO: 51074 - DNA, 371 bp, Gossypium hirsutum
  Clone ID: LIB3197-031-Q1-M1-H2
cggacgcgtggggtagcgggaaagaaagaagcctgagcaccgctgccgcagccaccatgggtcgtatgcacagtcgcgggtaagggtatttcagcctcagctctgccttacaagaggacccccgccaagctggctcaagatctcttctcaagatgttgaggaaaacatttgcaagttcgcaaagaaaggcttgaccccatctcagattggtgtcattctccgtgattctcatggtattgctcaagttaggagcgttactggcagcaagatcttgcgtatcctcaaggctcacggtctggcccctgaaattcctgaggatttgtatcaccttatcaagaaggcagttgccatccgcaagcatttggagagaa

SEQ ID NO: 51075 - DNA, 152 bp, Gossypium hirsutum
  Clone ID: LIB3197-031-Q1-M1-H5
cttgtcttggctccctccttttggagcgtttgtgtgtggattattgcaagaaatccaaggtgggtttcactgtctttccattaccccaagtcttcacatttgttggtgagccctacaacagtgttctcttaacttacttcctttttgagcac

SEQ ID NO: 51076 - DNA, 336 bp, Gossypium hirsutum
  Clone ID: LIB3197-031-Q1-M1-H7
cggacgcgtgggttttttttccctccgaagggggctttttttgcagatcaaggagagaaagttatggcagaagaagaaactgaactgagcgacaaccaaaagaaagagatcgccaaatggttcctcctcaatgctcccgcaggcgaaatccagtacgtcgccaaagatttaaaatccgttttgaataatgatgacgtctacgatgaggcggcatcggaagcatttcctgtttataacaaatctcacatgatttgcctcgaaatgtctggtagattcggagatgtgctggttacatcatatggggagcttcagggtaatgagtatctagaccccaag

SEQ ID NO: 51077 - DNA, 474 bp, Gossypium hirsutum
  Clone ID: LIB3197-031-Q1-M1-H8
atgaggcagtgcggatccggcgttgtccagtgagtttttcaaaggctgcggagagatggcggcggcttttcgaaaggcggctaagtcccggcagcgggaacaccgagagcgaagccagcctggctttcgaaaacatctgggcttgctggagaaaaagaaagattataaacttcgtgcagatgactaccgtaaaaaacaggaatacctcagagctctccgtaagaaggctcttgaaaaaaatccagatgaattctactacaaaatgactcgggttaaactccaggatggagtacatattattaaggagactaaggaagaagtaaccccagaacaactaaagctgatgagaactcaggacatcaaatatatagaaatgaagagggttgcagaagcttagaaaatttgaagactaaaatcagagctccatctgctggatttccaggggaagcaacagaacaagcatgtgttcttttt

SEQ ID NO: 51078 - DNA, 463 bp, Gossypium hirsutum
  Clone ID: LIB3197-031-Q1-M1-H9
tctatacccattaagtttcaattttgtaacggtaggaatcattatttctctgaattactatatctccttcccctgttttcaacccaatggagaaaaccccttttctaatttagtggatatacaaataatgtatcaatttgaagtgatctaaagaaatcctatgtttgtataagaaaatgtaataaaataaatcaagacatatttttagaattcgaaatacttttttgaagtatggtacaattatgacaggaatcgaaacgcttttcatataacgtaacgggtacaacccaatatctaagtggtttgataaatccttaaaacaaacgcaaaatgctaacgattaatacaaaaattacataaatcttttgaaatcgttgggtgttgtgctgaaattgtgatctctaaaaatcataatttttcattcatttattcaatccattaataaacatttttttataacttt

SEQ ID NO: 51079 - DNA, 442 bp, Gossypium hirsutum
  Clone ID: LIB3197-033-Q1-M1-A10
aaaagaaattttgaagaaaaaaaaatccatcaccgatctaagttccccaaattctgttcaaatcgccggcgaaattttgatctgaaaatctaaaaatgtcgtccacattcagcggcgatgaaactgctcctttttttggcttcctcggtgccgctgctgccctcgttttctcctgtatgggagctgcgtatgggacggctaagagcggtgttggtgtggcgtcgatgggagtgatgaggccggagctggtgatgaaatcgatcgttcccgttgttatggctggcgttttgggtatttatggtttgattattgcggttattatcagtactgggattaacccaaaggctaaatcttattaccttttcgatggctatgctcatctttcctctggccttgcttgtggtcttgctggtctctccgccggcatggctattgggatcgt

SEQ ID NO: 51080 - DNA, 409 bp, Gossypium hirsutum
  Clone ID: LIB3197-033-Q1-M1-A11
ctgcatcgcccgctcatgtgttccttggtcgacggcgtatcagcatccgacatggagaaatttctatgcgaccggttgcttgacccgacacaacccatatccgagcgcttccgagctctcttctcccttcgcaacctcaaaggccctgcccctcgcaacgctctcattcaagcgacaagggattcatcaaatttgttggctcatgaagctgcatttgcattgggtcaaatgcaagatgctgaagctattcctgctttggaagtagttctaaatgatctttctttgcatcccatcgttcgtcatgaggcagctgaagcacttggtgccattggtttggagagtaacattcctcttttgaagaatagtttggttctagatcctgctccagaagtccgtgaaacatgcgaac

SEQ ID NO: 51081 - DNA, 185 bp, Gossypium hirsutum
  Clone ID: LIB3197-033-Q1-M1-A2
gctgctgcgcgctgcaggtaccgaattcccagtttccggctccacccacgcgatcgtcaagttctttctactcttcctccatggcaccctgctacttttacactctgcaggctcaacacatatctccttgaaatgtccttttcactttcttaacgtttcacagtcttgaagatttgactacactt

SEQ ID NO: 51082 - DNA, 245 bp, Gossypium hirsutum
  Clone ID: LIB3197-033-Q1-M1-A3
acctacgctttttctttggcagtcgatgagtaagggaccgggactgttcataaatatcggattgagagccaaacatcttttgaccaaagattatacgtcggatcaaaagttaacggtttacacttatactgtcgctggagtggacataacatcaactattgtaataaaaagaggactatgtactgatgatggctcttttctatacctataccataacactcaatatgatgtcatagacaataccg

SEQ ID NO: 51083 - DNA, 336 bp, Gossypium hirsutum
  unsure (1)..(336): unsure at all n locations; Clone ID: LIB3197-033-Q1-M1-A5
aacaataattctctttctgtttctctggtttaaacatgggtatgggtttaaggaatggatttcttttgattntatcttgtgttgttacacttttcctctcagttntggggcgacctgccactttccttgaagatttagaatcacttggtttgattctcatattangcanatcgatggagggagagccatccaacttgttctcgaccaaaattcaagctgtggatttgcttcttaaaagcagtatttgttcggacgtgtcagcatgaaaatcaagctcatccccggcgactccgccggaacagtcaccgncttttatatgaattctgttacaaatgc

SEQ ID NO: 51084 - DNA, 219 bp, Gossypium hirsutum
  Clone ID: LIB3197-033-Q1-M1-A6
cccacgcgtacgaagaaaacaggtaacatagagtagcagcgatggttctaaagacggggctttgtcggtttagtggtgccaagatatactccagggaaaggcatcagatttatccgttctgattctcaggtcttctttttttcaaactcaaaatgcaagaggtacttacacaaccgtttgagccatcaaaactacatggcagccattataggagcacat

SEQ ID NO: 51085 - DNA, 337 bp, Gossypium hirsutum
  Clone ID: LIB3197-033-Q1-M1-A8
tcaagtttctcctctacgtaatccatggaagcctgcttcttcgacactctcaaggctcaacctttctgggttattgtccttttcactttgggttctttatcactcttgaagttctcatttgtttttctgaaatgggtctggatcaattttcttagacctggtaagaatctcaaaaaatatggctcctggggtcttgttactggaccaactgatggtatcggcaaaggatttgcctttcagctggctaggaaagggctaaatcttgtcttggtgggccgtaatcctgataaactcaaagacgtttccgattcaatcttggccaactatgccaagattc

SEQ ID NO: 51086 - DNA, 341 bp, Gossypium hirsutum
  Clone ID: LIB3197-033-Q1-M1-A9
cacataataacatccctattgtgcttagcaaaaaaaagaaaaaccccattgtaaaacagcctcactttgaaagattttaagagcaatggtaaaatttccagtgatcaacatggagaaactcaatggtgaggagagagcagcaaccatggagttaatcaaagatgcatgcgagaattggggcttctttgaggtgctaaatcatgggattccctatgatttcatggacaaaattgaaagcttgacgaaagagcattacaagaaatgcatggagcaaaggtttaaggaattggtggcaagcaaggcccttgagggtctccaagctgaggttactgatatggact

SEQ ID NO: 51087 - DNA, 225 bp, Gossypium hirsutum
  Clone ID: LIB3197-033-Q1-M1-B1
tagctgaagcccctgcgcgtgccggtaccgaatcgcagtttccgcctacacccacgcgtacgcgtttttttttatctaaatgctctctgacacagacaccaattgcgaagctgtggatagcacctcttcccgtgcttgccagacggagcttatgaccggttggtgatcaaaatgcaccggactagtgttgaagggagagtagctctcctttcaagacatcgagaa

SEQ ID NO: 51088 - DNA, 359 bp, Gossypium hirsutum
  Clone ID: LIB3197-033-Q1-M1-B10
cggacgcgtgggctgaatttccgatctccgcagagtgcttagcattcagctgctattagttgggtggttgcaaggaactgatctcaggcatggagaatgacaaggagctagaacaaatagatgtacaggagtctgaaaaatccatgccgtcatctgaagaggaggatgcagctataaggaaaaaatatggtgggattaagcctaagaaaccaccactcatttctaaggaccacgaacgtgcatactttgactctgctgattgggcacttggaaagcaaggtgttgagaagcccaaaggaccacttgaagccctccggcccaaattgcagcccacacaacaacaaacacgatacaggaag

SEQ ID NO: 51089 - DNA, 428 bp, Gossypium hirsutum
  unsure (1)..(428): unsure at all n locations; Clone ID: LIB3197-033-Q1-M1-B11
ccgtccgagtaacactactaaannaaaaaaannagagggagagatgagacgaaaagaaaaatgggcgcggcgcgacgatttnngtagaaatagaactaaagggagtgaagctttgaagaaaaaaatggcggagcttagggcttcaagaatcgaaacacnnagtgagatctaggctttacagagctggnnagctgcgagccctgacttccgttatatttaactctggaatcgaacttcagcctcttctcgtcggcttccgctagtgttgatcgttgctcttttgcttccgatgctcatgaccgcgattccatcgcttccgaactctctttacatatggcaggacaagaaagtggagatcagaatgagagttttggtggaccagatccagatccagatccaaacaaagctataacagtccccaagcacat

SEQ ID NO: 51090 - DNA, 350 bp, Gossypium hirsutum
  Clone ID: LIB3197-033-Q1-M1-B12
atggctagtcaatagcttatagaatataataatcattattttattataataaaatagagattagagtttatgaaaaccacactttgtcaaatacacagcctgttaatttgttctgcatctttgagatctagagttttatttggaatagtatttaatgtatgccacttacatttttttccccagaaaataagcagatgtactttccatatttttacagccaagttgcatcttaatggagggcttagagtataaaaaccagtgaagagattatcttatctactcaaaattactttgaaaaaccccttcaataggcagaatctaggttttctgctgtgctttaactttgagac

SEQ ID NO: 51091 - DNA, 419 bp, Gossypium hirsutum
  Clone ID: LIB3197-033-Q1-M1-B2
acggcagccaccacatccttggctcacattatccccctgaaaatcctcactttcactccctcacaaactgcaaagctgcggcaatagcagcaatggctgcccatattttcatgacaaccccatcccacctcgctctctcttttccatcctcaactaacccttcaaacccaccggttcttctctcctcatttcgtggggtctctcttaagctccctcgtcaatccctctcccttgctgccactattcccaagaagcccttttctgtgtttgctgttaccaagaaagctgtcgctgttcttaaaggcaattcggaagttgaaggcgttgtcacgttgacccatgaaactgatggtcctacaactgtgaatgttcgaattactggtcttactcctgggcctcatggcttccacctgcatgag

SEQ ID NO: 51092 - DNA, 289 bp, Gossypium hirsutum
  Clone ID: LIB3197-033-Q1-M1-B3
aaaccataaacccgaataacatgattaatgaatggttaataataaccagaaattacgctttcacaatacaaagttttgaccaaacttgctgttaacatttccaaaatggaactttgtttttttcaaagattgaacatttaatccatggaaattaggtgacaaaacaaaccaacggacaaaaaaaaagaaactcgaactcgaaacttaagaacctcaagagaaggttttctgaatgaatacacttggattaaggattactacagcggttgacacaaacaattattacgga

SEQ ID NO: 51093 - DNA, 115 bp, Gossypium hirsutum
  Clone ID: LIB3197-033-Q1-M1-B4
aaaaaatggaataccgcaatgtttttcccattgttgttattttttcctttttcatcgtgggcgtgatttgtacggaaactttttcggcggagggatttgaagttgatccgttgat

SEQ ID NO: 51094 - DNA, 327 bp, Gossypium hirsutum
  unsure (1)..(327): unsure at all n locations; Clone ID: LIB3197-033-Q1-M1-B5
gaaacagcacgaatgagtaccataaacagcaccgcttgtttttcttcagtcttccaaaacccatcacaaactgaactttttcctgcanatttcaaatgtaggttcaattccaagctccccaagaagcaatctanaatgggtgctcctagaattntctgtaacttgtctgaaaccgagactggagttgatgataatcccagaaacagtaaggtttctgtgaggtccaagaacaggatggaagagtataacactgccatgaagaaaatgatgaggaatccatatgagtatcatcatgatattggcatgaactacacactgataactgac

SEQ ID NO: 51095 - DNA, 388 bp, Gossypium hirsutum
  unsure (1)..(388): unsure at all n locations; Clone ID: LIB3197-033-Q1-M1-B6
cggacgcgtgggtgaaggtgtcttaataaacgccttcgatttaccttcgatttccattgacttctctattgctacgtttntgaatttttagtgagcgaaaatgagagagtgcatttcagtccacatcggtcaggctggtattcaagtcggaaatgcctgggaactntactgccttgaacatggaatccagccttgatggccagatgccaagtgacaagactgtcggaggaggtgatgatgcttttaacaccttcttcagtgaaactggtgctggaaagcacgtncctcgtgctgtctttgtggatcttgagcctactgttattgatgaagtgaggactggtacttaccgtcagcttttccaccctgagcaactcatcagcggcaggga

SEQ ID NO: 51096 - DNA, 441 bp, Gossypium hirsutum
  Clone ID: LIB3197-033-Q1-M1-B7
gcggtttcttttctctctgagagcactctatcctttaggccttttgcttctctgcatgtttctgtcttaactttacataataaagaaaaaaaagaatggtgcccaacagactccttcgatcaactctcaaaacccagcttggttcatatataaaaaatgctgctgcgtacagaagttctatggaccacccacttaagggtgcattactggcaagattatatagtaccgagccatctttgcagagagatgattcatatttaaaggatggcaatgggtttaaggggcatgatatgctggctacattcacagctgggtggcagaccactgacttacatcccctggttattgaaaagtctgagggaagctatgtttatgatacccatgggaaaaagtatctggattctctcgcttggctatggtgtacagcattaggaggaagtg

SEQ ID NO: 51097 - DNA, 417 bp, Gossypium hirsutum
  Clone ID: LIB3197-033-Q1-M1-B8
ctcttcttctctctttttctcattcattctttagtttcaatatcaaagcaaaaatgggttcttcttgtaatgttgtttcaatggccttactggcttgtttggtgttgaactccttggtttttgttgcccacggtggtgacttttaccaggatttcgacctaacatggggtgacagaagaggcaagattttcaatggtggcaagctcttgtctttgtctttagacagggtttcagggtctggttttcaatctaagaaagagtatttgtttggaaggatcgatatgcaactcaagcttgttgctggcaactcagctggcactgtcactgcttattatctgtcatctcaagggccaacccatgatgagatagactttgaattcttagggaatctgagcggtgacccttacattttacaca

SEQ ID NO: 51098 - DNA, 411 bp, Gossypium hirsutum
  unsure (1)..(411): unsure at all n locations; Clone ID: LIB3197-033-Q1-M1-B9
ggaagaggaggatcttgtaaatgctcatagaaaacaggtggagactatgaacattgtcaaagaggaggtgaacctgctggttgaagcagaccgacctgggaagcagcaggacggttatatatctagactgaatgctattttttcgcagaaggctgacgatgtcgtgcagttacaaacacaaattgctcatttcgagaagctttacaggaacagaacattttagtgtcttgttctggctattggtgtacagggatgaagattagtaagtcagagtggtgcaaccatgggtttgcttgatgattcactgattgccatataacacccttcccttctttcttttaaattatatatacagccttcaagcaataggcaaaggaagtgatggatttacatngcctttagcatgctatt

SEQ ID NO: 51099 - DNA, 382 bp, Gossypium hirsutum
  Clone ID: LIB3197-033-Q1-M1-C1
caagctcctcttatttgtgctaatggagttcggaatacccttattccatatattcatcagctttcttcttgttttgttaattgcaattcgaagcgtgaggaaatctaaagctaggagtttaactcaaaggttgattccagggccacggaaattacctttgatcggaaatctgcaccagctcgctgattctactctaccccatcgcaccctgcgtgacttggctacgaaatatggcgccgtcatgcacctgcaactcagtcaagtttcaactgtggtcatttcttctgcagaaatggctgaagagattatgaaaacacatgatattgtctttgcttctaggcctttacttcttgcggccaagattatatcttatgaatgcact

SEQ ID NO: 51100 - DNA, 385 bp, Gossypium hirsutum
  Clone ID: LIB3197-033-Q1-M1-C10
gctaataataaggcgtttaactgtgtccgacaagaacaagatgatattgggaaaacaggtgtttcattgtctaaagatttgatgacgattgctggtaatgcacttaagtccaacattactacgttaggtccccttgttcttcctataagtgaacaaatcttgttctttgtcacattagttgccaacaagttgatcaatgctaaaatcaagccttatatcccggatttcaagctcgcatttgaacatttttgtatacacgccggtgggagagccgtgatcgatgagctcgagaagaatttgcaccttctcccggtacatgttgaagcttctcgtatgacgcttcaccggttcggtaacacctcatcgagttcgatctggtacgagc

SEQ ID NO: 51101 - DNA, 378 bp, Gossypium hirsutum
  Clone ID: LIB3197-033-Q1-M1-C11
aattcactctaatttcaggtacatctcataatttcattcgatcagagcttgttgattcgcattttcgcttcacgttgcgtttgctttcctgtaattttccatttttcttctatcaatcaacctattttacgttttaattttgtttctttctttcatgttacctgttccgatataatctttaacttggctattcatttccattgcatgatgatctttttgttgactttctgtctttattattcttttggttttacgggaagctcttgtgtaaccgaatatgccggtagggttttcaaatttacgttgtttatgtcatttacaacacgtgaaacgtctttcagttccgatttatctattagaaccgcttgaatttatgct

SEQ ID NO: 51102 - DNA, 57 bp, Gossypium hirsutum
  Clone ID: LIB3197-033-Q1-M1-C12
ctccccaccacaaccattggatccttccctcaaactttggagctcaggagagttcgt

SEQ ID NO: 51103 - DNA, 355 bp, Gossypium hirsutum
  Clone ID: LIB3197-033-Q1-M1-C2
aaaaaaacatggccaaagttctgttgttcattgcactatgtgtgcttccagctttggttagtgctacacgcattctgaataatcaattggtggtagaaggctatgtgtactgtgatacttgccgtgctggttttgaaacccctaagactagaagcctagctgatgccatggttaggttggtatgctccgacaggaagagcggccaagttgtcttcaaaaaggagggatacaccgacaaaaccggaaaataccagattcgtgtatccgaggatcacttggatcatatctgtgatgcagttcttgtgaagagctcccagcttggttgtgccacaatgtccaccggtcgtgaacgtgc

SEQ ID NO: 51104 - DNA, 404 bp, Gossypium hirsutum
  Clone ID: LIB3197-033-Q1-M1-C3
cggacgcgtgggtttcttgctgtgccgcgtcaagcctcaaaattctgcaacaccggcctccctctctccctccctccctccctctctctctctctctgcaaccatgactgccacgatgggtccaccgcctcccagtaaccctaacccctcgaccgaacccgagtcgatagcccaagaagaatccgaacccagaacagccaaaaccacgatgggtcctccgccacctcttcccataaaccctaaccccgcgaccgaacccgagtcgatagccctagaagaatccgaactcataaaagccaaaaccacgatgggtcctccgccacctcttcccataaaccctaaccttgcaaatcccctagacgaagaagaaccatcgaactcaaagtcagaacccaaatcaactg

SEQ ID NO: 51105 - DNA, 337 bp, Gossypium hirsutum
  Clone ID: LIB3197-033-Q1-M1-C4
ctccgccgtcccagcaaccatggcaaggtgcagcattaaagccattgatagcctcgattgctacaggtgtcattctctggttccttcccgtcccatccggtgtctctcgtaacgcctggcagctactttccattttcctcgccacaatcgtcggcatcatcactcaaccattaccactcggagctgtggctttacttggactaggagcttccgtcctcaccaaaaccctaaccttttccgctgccttctccgcttttggcgatcccattccttggctaatcgctctcggcttctttcttcgctcggggtttcatcaagactggacttggtaatcgaa

SEQ ID NO: 51106 - DNA, 456 bp, Gossypium hirsutum
  unsure (1)..(456): unsure at all n locations; Clone ID: LIB3197-033-Q1-M1-C5
cggacgcgtggggttaaagaagctgtttctaagtttggaggaattgttgattggaaagctcatagaatgcaaactttggagagacgcaagcttgtggaacaagagtttgtaaaagtacaggaagagatgcctgaatataaaaaacggtcagaggatgctgaagaggcaaaaatgaaagtattaaaggagctcgatagcacaaagagactaatagaagagctcaagctaaacctggagagagcacanactgaagaaaatcangcaaaacaagactctgaactagccaagcttanggtggaggagatggaacaagggattgctgatgaggctagtgttgcagcaaagacacagcttgaggttgctaaagccaggcatgcagctgcagtttcggaactgaaaaatcgtaaagaagagttggaaacattaaaaaaagaatatgcttctttgatgaatgac

SEQ ID NO: 51107 - DNA, 376 bp, Gossypium hirsutum
  unsure (1)..(376): unsure at all n locations; Clone ID: LIB3197-033-Q1-M1-C6
atcagcttcaccggccatgggtatcgacttggtcgccggtggcaagagcaagaagacgaagagaactgctcccaagtccgatgatatctacctcaaactcatcgtcaagctntaccgatttctggtaagaaggactggcagcaaattcaatgctgtgattntgaagcgtctntntatgagcaaagtgaacaagcctcctctctctctatccagattgattgaattcatgaagggcaaggaggataagattgcagtggtagttggaactgtcaccgatgacattcgtgtatatgaagttcccgctctgaagggtactgcactaaggttcactgagacagcgagggcgagaattgacaaggctggtggggaatgttta

SEQ ID NO: 51108 - DNA, 304 bp, Gossypium hirsutum
  Clone ID: LIB3197-033-Q1-M1-C7
ggaggatggttaccaggaagctataggtgctgctgatgtaatgaggttagatccattggagcgtgctgaaattgctgctgacttgttggaggtgaagtggtctactaatattatatctaatagatcaaatactaatggttctggattaccttccacgaatgatgcattggataataaaagctactaagagcatacactgattactcgtgaagaaaaccacgttcaatcttcagtacatgatgaggaaggaaataataaatgtgaagaaaaccaattttactctgcaatgtttcatgaggaaaat

SEQ ID NO: 51109 - DNA, 431 bp, Gossypium hirsutum
  unsure (1)..(431): unsure at all n locations; Clone ID: LIB3197-033-Q1-M1-C8
gtcgttgaagcgaaagcttatctctttgcgtctctgaatctgatcaatcaacacctgaaaaggaaaacttacaaacaacaactactactagtctactacccagcactagaagcagctcgtagccagccatggatgaagagtacgatgtcatagttctaggaactggtctcaaggaatgcatcctcagcggtcttctttctgttgacggactcaaggttctgcatatggataggaatgattactatggaggagagtctacatcactcaacctcattcagctctggaagaagtttagaggaaatgataagcctcctgctcatttgggctctagcagagattataatgtggacatggtccctaagtttatgatggcaaatggcactcttgtgcgtngtcttattcatacggatgttacaaagtatctttacttt

SEQ ID NO: 51110 - DNA, 420 bp, Gossypium hirsutum
  Clone ID: LIB3197-033-Q1-M1-C9
attatttacgttaagttcaaagaaatggctgggcgtgtgatcactcgcgtccacagtctccgtgagcgtttggatgagacccttcttgctcacaggaacgagattttggccttgctctcaaggatcgagggcaaaggaaaaggaattctgcaacaccatcaaattattctagagtttgaagctatccctgaagagaacagaaagaagctcgctaatggtgcattttttgaagtattgaaggctagtcaggaagcgatcgtgttgcctccatgggttgcacttgctgttcgtccaaggcctggtgtttgggagtacattagagtgaatgttcacgcccttgttgttgaggaactcactgttgctgagtatctccacttcaaggaagactttgtgatggaagtcaaatgaaactttgtttgg

SEQ ID NO: 51111 - DNA, 367 bp, Gossypium hirsutum
  Clone ID: LIB3197-033-Q1-M1-D10
atggattacaggcgtaagccaccgcactcagccagacagatactatttttaaatgatctttctaacagtattccgttaaatgactaaattaatgtttctgaaatcttgaaatttttaaattaaaattttacaggattggggtttatattcttgtatatttaaaagcaaaatttccttttgtcatctgtgttgcagctctaaaccaccttatgctaaatttatcacttgtttagctgatctcttttttgttttaatgctctaatatacatgaaagattgtggaaaaaaaaaattttttttaagttggggaactataccgagggtatatatgcaatttaatccagaccaaaaaagtatgacagtgagga

SEQ ID NO: 51112 - DNA, 413 bp, Gossypium hirsutum
  Clone ID: LIB3197-033-Q1-M1-D11
cattttcttattgattttgcagatcggttctctaatccttttttcgggtgtagcgttgtttatacgtttggttgttgttgaagaagtgctactaccatggctacaaagaagagcgttggggacttgaaggaagctgatttgaagggaaagaaagtgtttgttagagtcgatctgaacgttccattggatgataacttcaacataactgatgacacaaggatccgtgccgctgttcccaccatcaagtatttgatgggtcatggctctaaagtcatcctctctagtcatttgggacgcccaaagggtgtcactcccaagtacagtttgaagcctcttgtgccaaggttatctgaactccttggagtcgaggttaaaatggcaaatgactgtattggtgaagaagttgagaaaat

SEQ ID NO: 51113 - DNA, 253 bp, Gossypium hirsutum
  Clone ID: LIB3197-033-Q1-M1-D12
gaggtgcgcgacgaggtggcggcgatgaagccgccggccttcaaccgcttccagcacaccttctcgcacatcttcgccggcggctatgcggcgggctactacagctacaagtgggccgagctgctcagcgccgacgcctggagcgccttcgaggaggaaggcgtgctcaaccccgagaccggccggcgctaccgccgcgagatcctggaggcgggcggcgcgcgcgacgcgatcgacaacttcaaggccttcc

SEQ ID NO: 51114 - DNA, 338 bp, Gossypium hirsutum
  Clone ID: LIB3197-033-Q1-M1-D2
ctctttacaaaatatctgctcctcttactttccctttttgtcccttgtttattcgatactcccccctcatggctgccgctgatgtcgagttacggtgcttcgtcggagggctcgcatggtccaccgacgaccgggcccttgaagaagccttcattgcgtttggtgaaatcgtctaatcgaagatcattaatgatcgtgagactggaagatcccgaggctttggattcgttactttccgtgacgagaaagctatgagggacgcgatcgaacgaatgaacggtcaaaatcttgatggatggaacataactgtcatacgaaccccaatcgcgcagaaatgg

SEQ ID NO: 51115 - DNA, 455 bp, Gossypium hirsutum
  unsure (1)..(455): unsure at all n locations; Clone ID: LIB3197-033-Q1-M1-D3
ggatgagatttatactccgatgtctttccttccgaggattctgtcctcagatctgctcgcatcggttcaacatatcctctttgatttctgatgttgtactgtgaaaggagtagcgtcgttggatctatggttttaaaggcctttgctgggcaaggaagcaaagattggcaggattcaagttcttgctgctttttaaggatggtctcaccaggggctgagatttatacgctcttcagatgtaagttgaaaataaacaaggcatctgattgtgtgagacggcgacgtgagattgaatcggctggtttgcttatgaaaggatgtgtaagatgtccgggcaaaaagtcctactgataatatttttttgaaggggaccgtgtcctgatctatctttgtcgtccgagacctttgccatgacaggtgcgcttgcatggcangtcaccaaacttaataaaaat

SEQ ID NO: 51116 - DNA, 90 bp, Gossypium hirsutum
  Clone ID: LIB3197-033-Q1-M1-D4
gaagaaacttaaaaatcgccatctaaaacaaggccaacacgcatacttacaaacggcaaaggatctctctcgtctcgttcacttaaacat

SEQ ID NO: 51117 - DNA, 379 bp, Gossypium hirsutum
  unsure (1)..(379): unsure at all n locations; Clone ID: LIB3197-033-Q1-M1-D5
taaaccttctgcttagcttaaaaaatcttgaatccgtcctctcctacttccttcgttatcgtcaatggcttcggacaagaggattaagatcgggattaacggattgggaaaaatcggacgtttggttgccagagttgctcttcagaggaacgatgttgaactcgtcgccgntaacgatcccttcatttccaccgattatatgacatacatgttcaaatacgacagcgttcacggtcaatggaagcaccatgatctttaggtcaaagactctaaaaccctcctctcggcgaaaaacccgtcactgttttcggaatcaggaaccctgaggagattccatgggctgaagccgngctgagttcgntgtgagtcaactgagtgt

SEQ ID NO: 51118 - DNA, 440 bp, Gossypium hirsutum
  unsure (1)..(440): unsure at all n locations; Clone ID: LIB3197-033-Q1-M1-D7
cacgccgnntccggcttttttcttctcantttgnngtttctgcgagattggagggcgattcaaaaatcangggaagtttaaccagtgtcccatcctctggctttcctaatgaagtttagtcgttcggatcgcggatannaatgaagctcgaagtcggaagttgttcttgtttgtatcaaattagtttgatttggattcagcaaagccctttgtgatgaattttctaatacatcgggtgtaagcaactggacatgcacatgctcttccggaaaccagagctatatccttaaatctaactgttctaggtcctgtgattgcaatccagttgaatcaagtggagataggtggacatgtgtatgtgccactaatgggtttcccgaagtagcagtcgacaatcatgatactacctgttntacagcctgcaactgcactgctgggtc

SEQ ID NO: 51119 - DNA, 401 bp, Gossypium hirsutum
  unsure (1)..(401): unsure at all n locations; Clone ID: LIB3197-033-Q1-M1-D8
ctttgctggagttgttgatggaaggaacatttgggccaatgatcttgcttcttcacttaggaccttgcaggctcttgaagctgttgtgggcaaagacaagcttgtggtgtccacctcctgctcgcttctccacactgctgttgatctagtaaacgagaccaagctagatgacgaaatcaaatcctggctggcattcgctgcccagaaagttgtcgaagtcaatgcacttgccgaggcattggctggtcagaaggatgaggccttcttcactgccaatgcatctgctcaggcttcaaggaagtcctccccgagagtgaccaatgaggctgttcaaaaggctgctgctgctttgaagggctctgaccaccgtcgtgctacanatgttactgctagactcgatg

SEQ ID NO: 51120 - DNA, 274 bp, Gossypium hirsutum
  Clone ID: LIB3197-033-Q1-M1-D9
ccgagaagtaaacagaaaaaggaagaattttggtgaccggtgattcgtgagtattgtaaacagcaacagcagcaatggagctgttctacttcgtggtgttcggggcattgggagcgggggtggcagcattagagctcagccagaacagccaagatcgaatcaacacattctctgctttcaatttctttaagaacaaatatcttgtcgcttattctctcatgatagctggagactcgctgcaggggccgcatgtttactatctttacagaacata

SEQ ID NO: 51121 - DNA, 220 bp, Gossypium hirsutum
  Clone ID: LIB3197-033-Q1-M1-E1
ataaaatggcaactcttaaggaaaaactcattgcaccagttgcggaagaagaggcgacagtcccaaacaataagatcactgtagtgggtgttggacaagttggtatggcgtgtgctgtcagcattctgggaaagtctctggctgatgaacttgctcttgtggatgttttggaagataagcttaaaggagaaatgatggatctgcagcatgggagcttatt

SEQ ID NO: 51122 - DNA, 425 bp, Gossypium hirsutum
  unsure (1)..(425): unsure at all n locations; Clone ID: LIB3197-033-Q1-M1-E10
cccacgcgtccgctgaccgtaaccctagaatgcacccaatccctaaccctgcgggaactcaaatcctctctccttccgaacccacaatccttctcctccttctacttcaccctcaatggaaaacccctctctgattccacccttctcccaaatccccaaatttcccatctttcaaccctttttctcctcccccgcgtctccggtggcggaggcgatggcggcgccactggagccgagtcccgcgactgttatctcaagatgtacgctgtcaaaaagcccgataaagtcgaccccaatgagaaaaggcttggtaagtggctcaattgtgccttatctaatgaacctctaagagaaccttgtgtgattgataaattanggaatattttcaataacgaagctctttgtgaagctttgtgggtaagaaa

SEQ ID NO: 51123 - DNA, 107 bp, Gossypium hirsutum
  Clone ID: LIB3197-033-Q1-M1-E11
tatagggaaagctggaacgcctgcgcgtacccgtaccggaattcaatttccgacccaacccacccgtttcaacaacatcattgttactaacacactggcggtgattc

SEQ ID NO: 51124 - DNA, 441 bp, Gossypium hirsutum
  Clone ID: LIB3197-033-Q1-M1-E12
cggacgcgtggggtttcaagctttcttattaccttccctccattcttctgtaagttcattagttgccgcttgggagaaaatgggaccaggtgggccaggagggccaccggggccaggtggaccaggagggccaggagggcctccggggccaggagggccaggatggggcggtcctccacccggaccaggagggccaccaggatggggcggtcctccacccggaccaggagggccaccgggatgggggggtcctcctcccggaccagggggaccaccggggtggggcggccctccggtcggaccagggttttttggtggcttctgtgatgtaattggtgcttgtgtcaacttcctgtgctgctgctggctgtttcgagattgttttggtggtccaatgggtccttcagggccacctggacctccaccaccataggtacatgc

SEQ ID NO: 51125 - DNA, 339 bp, Gossypium hirsutum
  Clone ID: LIB3197-033-Q1-M1-E2
gctggctcttgctctaagggtttccatggaagaggagaggtcaaggcaagaagctgctgccaagagagctgctgaggaagccactagacaagaaaaaggagaggaagcacaaccacagtccgattctcagaatgcaacaatgaatgctactgaaaaagcttctgacccaatggatgaggatgacgctttgctaaagcaggcccttgcattgtcgatgaatatccccggatctgattcttctgcaggtgatgctcaaatgtcagaggcaactaatgacgaccaggaattcgccttggcacttcagatgtctatgcaggacggttcaaaagattcgtcagc

SEQ ID NO: 51126 - DNA, 379 bp, Gossypium hirsutum
  Clone ID: LIB3197-033-Q1-M1-E4
tccggtaacatggggataagtatggcattcatggcagccatgaaaggttataaaatggttctaaccatgccttcttacacaagcatagagagaagggtcaccatgagagcatttggagctgatttaattctcacggatcccacgaaagggatgggtggaacagtgaaaaaggcttatgacctcttggagtccacaccgaatgctttcatgttgcaacaattttcaaatcctgccaacactcaggtgcattttgaaacaacaggtcctgagatatgggaggatactcttggtaaagttgacatcttcgtaatgggaatagggagtggtggtactgtttctggtgttggacagtacctcaaatcccaaaatcctaatgttc

SEQ ID NO: 51127 - DNA, 411 bp, Gossypium hirsutum
  unsure (1)..(411): unsure at all n locations; Clone ID: LIB3197-033-Q1-M1-E5
gccttctcaaaaagaaagaaaaaagaagaaaagaaaaaaagaaaaaaaagaaaaaagagaaataaaagaataaaagtgaatgaaaatttctctcgtttgagaagtgaatcactacaaaatatatatcttccgcaggaggcagaattacttaaggctgtagagtagaaacggaggttgctttctcttttatgaatttcttgtaaagaataaagaagagaaaaatgtacaagatgaacatgtgcgacatggatatgtacagcatcaacactaactgcagttttaggattttcataacaagttttaggagacagtttcttttggtttggtagaagataggcctcatagtcgtttttacattagaagggttggttntaagcttgttgatagggattgatctangtagaaatggaa

SEQ ID NO: 51128 - DNA, 222 bp, Gossypium hirsutum
  Clone ID: LIB3197-033-Q1-M1-E6
aatgtcgactcaacgtcccgtatcggaaacatattgtacttacacactggagtgaggctattttatagatagcggcatatttagatatatgctatagatagctgatatatgggtgtttggattatgaagtacaaaaacaaaggaatgccattgaagtattaccgaggtgtttttgttggtgcaagacaagctggtgctacaaagaatgagtgaagtcacact

SEQ ID NO: 51129 - DNA, 288 bp, Gossypium hirsutum
  Clone ID: LIB3197-033-Q1-M1-E7
tgtaattactttgagaggaaaatggggaaacaggcggtgaagatgagggcggtggtatacactttgtcaccgtttcaacagaagattatgagtgggctgtggaaggatctgccgggcatgatctattacaaggtttcctgagaattggatcagctgctactcttatacatactcctgtcgttggaacttacgcatatgttcagttcttcatagaaatcgagaaatttgatcatttttattaaaaacctcaagaagcatacgtattttctgagtaacactaagcttttt

SEQ ID NO: 51130 - DNA, 447 bp, Gossypium hirsutum
  unsure (1)..(447): unsure at all n locations; Clone ID: LIB3197-033-Q1-M1-E9
gcgggattcgcggtggtaactatactgcgatgccttgttcttcgatcgagactagcaataatttttgtggtggcggtgacggaggtgatgtgaatgggcgtattcacaatttcaagctgaacgagcacactttcttagcttctctgatgccgaagaaggagattggcgccgatcgcttcattgaagctcatcctcattacgacggtcgcggcgccgtcatcgcaatctttgattctggtgttgaccctgctgcttctggcttgcaactgacatcagatgggaagccaaagatcttagatgttattgactgtactgggagtggagatgttgatacctcaaaagtggtgaaggctgataaagatggtcgaattcaaggagcttcangggcttcattggttgtcaattcttcttggaaaaaccttctggtgagtgcatgtgggctataaa

SEQ ID NO: 51131 - DNA, 449 bp, Gossypium hirsutum
  Clone ID: LIB3197-033-Q1-M1-F1
cccacgcgtccgatttatcagcaacaaagcatcagtgtcaaagaaaggcaggttaccgttacaagacaaaagctggtgtggtgttacaggcaagtttctcagtcctccgacatgtatgaatccttgtaatttcagtttgttatgctagaagaaagcccgaatctaaaccagtaaaaccccacgagaagaaaaaaggaaaaaacaatggcaccacctataatcagatctctaatcgcattctctctgaataaatcatgccgttctcagaaacccatttctggttactccatctcttctattttcttctcatcttcacccacccaggaatcaagagcttcccttcctttagcggatcacttggttgagaaacacagcttttcccctgaacttgccgtcaagactgcatcttccctaacctatgtgaaggatcctcgtagtgtgatactata

SEQ ID NO: 51132 - DNA, 420 bp, Gossypium hirsutum
  Clone ID: LIB3197-033-Q1-M1-F10
atttgcctgatatcatatcaagaacgaagggcaaagggggcggcggcttcggtcggagtagttgcttatctgtgactgagttttctcgacgcaccaccaacatcacaaagcgccatgggtttactatccctctcatcttctctaaccccttccttcccctctcttcatctcaaacctaaacataaactctctcttactttcccaaacccttcctttgcgtgctccgcacccacatccaaacccctctcctcatctctcaaactgaaacctactgcgaattccctcaaattttcatcccctcagagccccgccaccgccatgcgaggggccgaggccgacgctatggggttgttgctcaaggagcgaatcgtttttctaggtaacaacattgatgactttgcggccgatgccattataagt

SEQ ID NO: 51133 - DNA, 440 bp, Gossypium hirsutum
  Clone ID: LIB3197-033-Q1-M1-F11
ttctttaataaataaattatcttcttagcagatccaaatgtaaaagagactcccatcaaagcaacccttctttgtttgtcaattcccagtccaaatctttcaacatctcacgacctcttcgcattgcttcattattagtagatccctatctcttgtttctctcctcttaaactctatttttttttccgtccagattgttctagaattttagatctttgtttctttttttttttcagaacaattttccatcaaattttgggtactttccagatatgggaaaagtttcagccattatatacattgctgtggctcttctaatcctcttcctcatctcgcattcccctaagaaacaccccaaccacagccgccatcgccgcctaaagctccgctcttctttcagcttcagcaaccccacccaccacgagcccgtggcttttgat

SEQ ID NO: 51134 - DNA, 485 bp, Gossypium hirsutum
  unsure (1)..(485): unsure at all n locations; Clone ID: LIB3197-033-Q1-M1-F12
cggaccgccgtgggcggacgccgtgggatcatgctcatgaatcttcccgcctctcaccaaactgnntgttcagctttccttcgaatcccttattgggaaaagaagaacatnnctgctgctgaatgaaccgtagagggcattttgtttaatattcatatacccacccttttggaatgctatgataaaatgcaagcagtgtgccatttttggattctatagaacagcttaagcatcaccaatggaggaagctgtactgtctggtcgatgaaagtatgatacggaaaatagctaaaaccagggggaggggggtggngggttgaggtcagtaccagcagcatgctgtaatgacagttgctaacctctttttgagcctcgaaattnttgtatgtcgtacaaggattcaagtgttgttcattcattataaacatatttgtanggaggagagctaaccttaaatcaagtgaatagatatattttgggaaaaa

SEQ ID NO: 51135 - DNA, 308 bp, Gossypium hirsutum
  Clone ID: LIB3197-033-Q1-M1-F2
cctcgtgtttttgtgcttcttatggtcatttgatacctagtgtttatgtcattgatctgctttttggtggtgtagtaactagtttattagctgatttatatggatatgctactatggagatgctagatttaatgttgtagagctatgtcgtgaatgtttaagcccaaagcagttattttatgcctattaagctcgaaaaaaatcaaccagggatgtttgttcttctttcaagtagttcacctaagtcagagtgggagatatctgcaaattaaactcaaagattggctctgggagatagtaacatggac

SEQ ID NO: 51136 - DNA, 448 bp, Gossypium hirsutum
  unsure (1)..(448): unsure at all n locations; Clone ID: LIB3197-033-Q1-M1-F3
gctgttgaagtagtaatatctatagcatacagagatggagaggcaaagaagcaagcaggtttgtttgttgatgtgggttttggttgctgcctttttctcccacaatagggtcattgcagtgacctccactggccttggtgagcagaaaaactactatccagctcctgaccctcatgctggaactcccccttcaggttcacatggcacaccaccatcttcaggaggtggatcacctccctctcatggaaccccgtcacatggaggtggttaccacccttcaccaacaccatcaacgccttcgggtggaaattgtggaactcccccacatgacccttcaactccatcaacaccatcacacactcctnctcatggtactccaccatcatctggaggtggtagtcccccatcgtatggaggaggcagtcccccatcgtatggaggaggcagt

SEQ ID NO: 51137 - DNA, 444 bp, Gossypium hirsutum
  unsure (1)..(444): unsure at all n locations; Clone ID: LIB3197-033-Q1-M1-F5
cacgcccgtccgattacctttttatnttttttcagaagccctccttcacgcaaacgtccgctttctgttcagccgcggtgatgcttnnttgatcttnntctctatggnnntaccatttcnncaagctctctannaccccaacccagtcgcnnttctctttcaatcatcttccaaacccagnatcttcttcatncgcttaaatgccttcnngttgggttccctaaccaggcctggtttctgctctaagctggtttcatcttctagcttgtcctcgataaacacccaccctttcaggggctccttggttgtcaggtgttctcttgctgatggaaacggtagttcagtgaagaggactactttgcatgatctgtatgaaaaagaagggcagagtccatggtatgacaacctttgcaggccagtgaccgatttgctgccactgattgc

SEQ ID NO: 51138 - DNA, 458 bp, Gossypium hirsutum
  Clone ID: LIB3197-033-Q1-M1-F6
cggacgcgtgggttactatctcaaatttctcgccgtggtggttttgcagttgctaatcaagtctgaagcttaagttcagatgatttgaccgagaagaaacggtaaactcccgcattcagaatcatgggccattgctgtagcaaaaacgtgtccgtcaacaatgaagcaacctccacagtcaatcagtctcagccgcgaccggttccggcctcggcaaccccatccgttgagacaaactcttatgctgttagtccatttgctagtccactacccgctggagtggcgccgtctccatcaccagctagaacaccgggaaggaagttcaggtggcctttgccgccttcctctcctgccaagccgatcatggcagcaataatgagacgaaaggggtcgaaccaggcggctccgatggaagaacaattcccgagatggggaggagcgggctagacaaaaatttg

SEQ ID NO: 51139 - DNA, 71 bp, Gossypium hirsutum
  Clone ID: LIB3197-033-Q1-M1-F7
ggaaagccgcacgcctgccgtaccgaaccgcaattcccacctcaacccacgcgttttattttcttaaaacc

SEQ ID NO: 51140 - DNA, 433 bp, Gossypium hirsutum
  Clone ID: LIB3197-033-Q1-M1-F8
gcttgcttaaaacctgtggttcaatgttggaagcatggcaaggttatatagcaatggaaattgctttaggccatataaatgaagccagggccatatacaagagatgctacagcaaaagatttagtggaacaggttcggaggatatctgccatgcttggttgcgctttgagagggagtttggaacattggatgatcttgaccatgctgtgcaaaaggttatgcctcgtcttgaggagctgcaattgtttaggttagagcaagaatctaaatctttaactgaagtgacagataaaagggagcggccccttaagaaaactgctagtgaaaagaggaaatcgggttcaatcacaattgatgaacagtctccagctaagcggcagaaaagtactcaaaatcagaagaaattgcatgagaaagagaacacacgagggct

SEQ ID NO: 51141 - DNA, 456 bp, Gossypium hirsutum
  Clone ID: LIB3197-033-Q1-M1-F9
aaaaccattaaaaaacccaagtcaaaaagttgcttactaacagtttccccacatcaaattcaacataaaattataattatatccaaaaaaaaacaataaacccagatccaaaaacacacacttaagatctgggtttatctagaatcattgaatcaacactaccttcaatcagtattttgttcctttccaatggcaaatccccacaaatccaggttctttcttttcttcttcttcatttgtcatttcattttcgtttctacaccttttcccactgttttagcaaactctaagcacgaatttaatgatccccatgaagttttattgcacaaacttgaagaattagtgaagaatcttagtgaagtagtttctagattagaaacgaaggttttaaaggaatctacaaaaattgatgatggggttggaagtaaagatgaaactagtttaataaaatatgat

SEQ ID NO: 51142 - DNA, 466 bp, Gossypium hirsutum
  unsure (1)..(466): unsure at all n locations; Clone ID: LIB3197-033-Q1-M1-G1
atcgccgccggagggtcgtcttaaagggcccgcgcgccgccgccccctcggcccgccatgctgctatccgtgccgctgctgctcggcctcctcggcttggccgccgccgagcccgccgtctacttcaaggagcagtttctggacggagacgggtggacttcccgctggatcgaatccaaacacaagtcagattttggcaaattcgtcctcagttccggcaagttctacggtgacgaggagaaagataaaggtttgcagacaagccaggatgcacgcttttatgctctgtcggccagtttcgagcctttcagcaacaaaggccagacgctggtggtgcagttcacggtgaaacatgagcagaacatcgactgtggnggcggttacgtgaagctgtttcctaatagtttggaccagacggacatgcacggagactcagaatacaacatcatgtttggccctgatatct

SEQ ID NO: 51143 - DNA, 112 bp, Gossypium hirsutum
  Clone ID: LIB3197-033-Q1-M1-G2
gtggtttgttttcaccaacgccagacaagccattccttgtttcccaaccgccgcaggaggaatccccaattcctgcccatttccattacaaccttggttacaaccccaccat

SEQ ID NO: 51144 - DNA, 402 bp, Gossypium hirsutum
  unsure (1)..(402): unsure at all n locations; Clone ID: LIB3197-033-Q1-M1-G3
ggttcatacaatgcacctgctggggtcatttattccttcccagtaacttgtcgcagtggagaatggacaattgtccaagggctggcaattgatgaattctcgaggaagaagttggacttgaccggagcggagctgaccgaggagaaggaattgggcatactcctgcctctcatgaatggattgaccatntattcaatgtgtggtatggtatgctntggtaggatagcagcagttttgaataagaaagggattctagatgaactgttaatggtggggaaagccgccttncccgatcttgcatctttaagaatgggttttctgtttttattactgaccccagagttcagatcgattntaaatgggggataagcaaagaactattgtcatncatacgaatgtatg

SEQ ID NO: 51145 - DNA, 379 bp, Gossypium hirsutum
  unsure (1)..(379): unsure at all n locations; Clone ID: LIB3197-033-Q1-M1-G4
gaaaatctcgaagcttccttttccgttttagatctcaaaattcaaaaagctctctttttcatctcatggctgctactatcgtctccgtcaaagctaggcagatcttcgacagccgtggaaatccaacgggtgaggttgatgtggaaacatcgaacggtataaaaggctaggccgcagttcctagcggtgcatccactggaattacgaggctcttgagttgagagatggaggttccgattacctcggtaaaggtgtatcgaagggctgtgctaatgttaacacaatcatcggccctgcattgattggaaaggacccaaccgagcagactgcatttgacaatntcatggttcaacaactggatggaactcannatgagtgg

SEQ ID NO: 51146 - DNA, 456 bp, Gossypium hirsutum
  unsure (1)..(456): unsure at all n locations; Clone ID: LIB3197-033-Q1-M1-G5
gttgaatccccctggaaaagccaccattcatgttgaaaatgttgatgaattcaagtggcttaattcatcctattcccctgtcctacgtcaacttgagactgcttcaatgaaggagtattatttcaaggcggatcatccaactgtatctggatcttcaaacttgaagtatcgaaacccgaagtatctctcaatgcttaatcacttgcggttctatcttccacaggtctaccccaagttagataagatactgtttcttgatgatgacattgttgtccagaaagacttgactggattatggtctgtggatctgcatggaaaagtgaatggtgctgtagaaacttgtggtcaaagctttcatcgttttgacaagtatcttaacttctcaaatcaccatatntcacgaaactntgatcctaatgctngtggatgggcgtatggaatgaatatgtttgatct

SEQ ID NO: 51147 - DNA, 372 bp, Gossypium hirsutum
  unsure (1)..(372): unsure at all n locations; Clone ID: LIB3197-033-Q1-M1-G6
tgaaaattcattttctttggactttctctgaaatccgagtcctaggaaagatgcgtgagattcttcatattcaggcagggcagtgcggcaaccagatcggtgccaagttttgggaggtggtttgcgccgagcacggcatagattcaacgggacgctatcaaggggacaatgatttgcaactggagcgcgttaacgtttactacaatgaagcgagttgcgggaggttcgttccacgagccgtccttatggacttggagcctggcactatggatagtgttagatctcggccgtacgggcagattttcaggcctgacaacttttgtnttcgggcagtccggtgcagggaataactgggccaagggtcattacacg

SEQ ID NO: 51148 - DNA, 403 bp, Gossypium hirsutum
  unsure (1)..(403): unsure at all n locations; Clone ID: LIB3197-033-Q1-M1-G7
cccacgcgtccgaagaaaacaggtaacagagagtagcagcgatggttctcaagacggagctttgtcggtttagtggtgccaagatatacccagggaaaggcatcagatttatccgttctgattctcaggtcttccttttttcaaactcaaaatgcaagaggtacttccacaaccgtttgaagccatcaaaacttacatggacagccatgtataggaagcaacataagaaggacattgctcaaggggccgttaagaagaggagacgtgccacanagaagccatactccagatccatcgtcggtgccaccttagaggttatccaaaagaagaggagcgagaaacctgaagttcgtgacgctgctcgggaagctgcactccgagaaatcaaggaaaggatcaagaa

SEQ ID NO: 51149 - DNA, 387 bp, Gossypium hirsutum
  Clone ID: LIB3197-033-Q1-M1-G8
caacaatggctacttcatcatcttcttcaaagctttcccttttcttcttgttttccttcttgtttgcttccactttagctcgtaattccccttcaccaacaacaaaaatcctcgatgtcttagcttctttgaaacaagctcagcatattctttcctttgatcctcaaatttctaatggtttttccaaaagccaaccccttttcgtcaactcttcttcttcatcgggttctggtttttcgattccacttcattcacggggctctttgcgaaaaacccatcatgttgattataaaaacctggtccgatcccgactcgaccgtgattcagcccgagttaacacgctcaccaccgaggtactactcgctgtcaatggggttcgcaaaactg

SEQ ID NO: 51150 - DNA, 435 bp, Gossypium hirsutum
  Clone ID: LIB3197-033-Q1-M1-G9
gttggcatattctgtcttggttctggtgctacaattgttcatggagttcaaaacctatggatagcacatcccccggataatattgagtatgcagctttggtgataggcggctcatttataattgaaggtgcttctcttgttgttgccattcaagctgtcaagaaaggtgcagcaacggaggggatgaaagtgaaggactatgtctggcgtggccatgatcctacatctgttgcagtcatgacagaggatggcgctgcagtaactggcctggctatagctgcagcatcactggttgcagtgaagacaactgggaatgccatgtatgatcccataagttccattatagttggcaaccttcttggaatggtcgcaatatttctcatccagcgcaaccggcatgccttgatagggagagcaattgatgaacatgatatg

SEQ ID NO: 51151 - DNA, 380 bp, Gossypium hirsutum
  unsure (1)..(380): unsure at all n locations; Clone ID: LIB3197-033-Q1-M1-H1
tttttgttgtgaaaaaaaaaatggttggtgtgtttaggttagtgaggggggtattccggaaccaagtggcttttggttcagccttccaccgccccaagaggttactcgaagggattgantggaaccaacttgactgctctagttaccggaggagcaagtggaattgggttggaaacttctagagtattggctcttcgtggagtccacgtcatcatcggtgcaaggaacatgaaagccgcgaatgaagcaaagaaccaaaatgttagagagaacacaagagcccgtatagatgttctggagctggatctttgctctactagttcaatcagatcatttgccgacaatttcattgctcttcatcttcctcttaatatcttaat

SEQ ID NO: 51152 - DNA, 420 bp, Gossypium hirsutum
  Clone ID: LIB3197-033-Q1-M1-H10
aagaaaaaatggctttgaattttaatcccatcgcctcgaaatctcagaagctcccttgctttgctcttccacgaaaggccaccctcagatctcccaagttttccatgatctccaccattccttctggctccaaagaggttgggaatctgaaaaagcctttcacgcctccaaaggaggtgcctggttagatcacccactccatgccgcctcacaagattgagatctttaaatctttggagggctgggctgagaacaacattctgactcacctcaaaccagttgagaaatgttggcaacccgccgactttcttccagatcctaattctgacggatttcatgagcaagtcaaagagcttagggaaaaggcaaaggaaatcccagatgattactttgtagtttttgttggtgatatgatcactg

SEQ ID NO: 51153 - DNA, 339 bp, Gossypium hirsutum
  Clone ID: LIB3197-033-Q1-M1-H11
cgccagaccaaatctccgccatatcgaaaaacagagatatgcagaagagagagcagggcaaatcaggtggctcggggggtggcaacgccgcacctccgccgaagagaggccgaccatttggaagcacagctgctagcgtagcctccgcctccgctgctgattcagtggctccgtccactctcctcggcccttctcttcaaatccacaactccttctctgagcagaacaataaaaggatagttctagcacttcaaagtgggttgaagagtgagttaacttgggctctgaatactctcacattgctctcttttaaagagaaagatgatatgcgtaaagatg

SEQ ID NO: 51154 - DNA, 385 bp, Gossypium hirsutum
  Clone ID: LIB3197-033-Q1-M1-H12
gcttcgaagatggatgggaaagtcgttgggtaaaatctgactggaagaaagatgagaacatggctggggaatggaattacacttctggaaaatggaatggagatcttaatgacaaaggtattcaaactagtgaagactacaggttttatgctatttcagctgagttcccagaagttaacaacaagggaaagactctagtcttccaattttctgtgaagcacgagcagaagcttgactgtggtggtggctacatgaagttgctcagtggtgatgttgaccagaagaaatttggcggtgacaccccgtacagcatcatgtttggccctgatatttgcggctacagcaccaaaaaagtacatgccattcttacatacaatgggacaaa

SEQ ID NO: 51155 - DNA, 121 bp, Gossypium hirsutum
  Clone ID: LIB3197-033-Q1-M1-H2
acccttccgccaagccttccgttaaattccgtggcattgacaattccaaccctttttttttcctggtttggttctttcttttcttccttttcttaagggaagaaccacaatgtggttaaag

SEQ ID NO: 51156 - DNA, 449 bp, Gossypium hirsutum
  unsure (1)..(449): unsure at all n locations; Clone ID: LIB3197-033-Q1-M1-H4
gcagattgcaaattttggttcttagggaagataaatctggatgaaacagtaagaagtattatgtcatgctctttacttctagatagaataggctgtttttagtttaacttttatgggatgatgttcttgaaatgtgatttactttattttgaaaagtgattattttactttaaactcttgaatcagtgtcttgctttatttgtttgctgattagaatttgttttctcagatccgttctgattctgatctttatatttaaagtcctagctgtttggttcctactcctttaccaaaaagagttcttagcctagttccaatataatgataatggcttgtgacagttgttggttaaattgttgataattactaagcaaacaaagcttgcagttaaatacataagactgatgactaaattgagaaaagggaatnnnttcgcttttgccatattt

SEQ ID NO: 51157 - DNA, 408 bp, Gossypium hirsutum
  unsure (1)..(408): unsure at all n locations; Clone ID: LIB3197-033-Q1-M1-H6
ctactataggcgaaagctggtagcgcgtgcaggtaccggaatctgaagtttccgacccacgccgtaccggtctggaactcaaagaaatcgctcaaaacccaagcacctggcgcctgcatatttggtagtgaatctagggggacagtctcattacaatgatggttatgcgtggatnntggtgatttatggtggttttgggccctgggtccttatagggtcttttggagggtacacaatctattcatcatggatctataggcactgtgcacttttgcaagttgtcactatctagaagatcaaatctatntagatntgcatgcttagtgaaaacccaagttagatcaagcatcaaactagaactgcagctactcatggtagagcaaacaaactcgatcatattagtagagc

SEQ ID NO: 51158 - DNA, 392 bp, Gossypium hirsutum
  Clone ID: LIB3197-033-Q1-M1-H7
gctccttgccgcaccacaaagtatcctcgagagattccaccattgccatggtacaggagtgctgttcctcagatggcaatggctggatttcttcctttcagtgccatctacattgagctttactacatattcgccagcgtttggggccacaggatctatactatatacagcattttgtttattgtcttcatcatccttctgattgtcactgcttttataactgtggctttgacatacttccaactcgctgctgaagatcatgaatggtggtggaggtctttcctctgtggtggatcaaccggtgtctttatctacgcctactgcttgtattattactacgctcgatccgacatgtctggatttatgcaaacctcgttcttctttggttatat

SEQ ID NO: 51159 - DNA, 396 bp, Gossypium hirsutum
  Clone ID: LIB3197-033-Q1-M1-H8
ctcaaagttcactacttgtgtgcagacaaaaatggcttttgctgggtttttcttgttgggtttactttcaatggtctcagctgttcatggatatggtggtggatggactaatgctcatgctactttctatggtgggagtgatgcttcaggcacaatgggtggtgcttgtggttatgggaacctgtatagccagggatatgggacaaacaccgcagctttgagcacagctctgttcaacaatgggcttagctgtgggtcttgctatgagattaagtgtgtgaatgatggcaagtggtgcctgcctggttccattgtggtcactgctaccaatttctgccctccaaacaatgctctcccaaacaatgcttgtgggtggtgcaacccttccctgcaaca

SEQ ID NO: 51160 - DNA, 429 bp, Gossypium hirsutum
  unsure (1)..(429): unsure at all n locations; Clone ID: LIB3197-033-Q1-M1-H9
gactgtcgcacctttagcaagtacagaaatcagttctgttggtgttaatttgaaacaggcatctcatgaggcccttcaggtggatgccatagaaagtgagaaaattacacagagtaaagctgaactcgatgattgggaagatgctgctgacatatctgcaccaaacatggaaacttcagacactgacgaacaggctcatgggggattagcaagtcatgaggaagatggaagtgggaatataaagaagaagtattccagagattttcttcttaagtttgcaggacaatatactgatcttccacagggatttgagattgcttctgatattgcagcggccttgatggcatcaaatgtcaatgcatctcatgctngtgatcatgattcataccctagtcctggaagaaaattggataggcaatctaatggatc

SEQ ID NO: 51161 - DNA, 143 bp, Gossypium hirsutum
  Clone ID: LIB3197-034-Q1-M1-A1
tcgctctttttcgattgtgcttcggtgaatttgaaggctcttaatcgaaaaatatggcgtctgtttctttcgcgacaagagttcttttcgcttcagtatttgtcctctctgcttggcaagagttcaatgaatttgatgttgat

SEQ ID NO: 51162 - DNA, 447 bp, Gossypium hirsutum
  Clone ID: LIB3197-034-Q1-M1-A10
ctctcttcctcctccaccatcatcatataatacacgtctaaagcatctgttcgctgcaaaaagtacacaatctcccacttcctcttttacactcccttcatttttggtctttcaaaccccataagcccttttcactcctttttatactctcattttacgtttatttcttctttctttcatagatccaggccttcttcttcttcttcttcttcttcttcttcttctatcaaagttaatataggcaaatataagagaagaaatcgaattaaagttgatccgtgaaactagataaagaacagtacgatttgttttgaccaaagcacattcgagccatgtcatttattggtacccaacagaaatgcaaggcttgtgagaagactgtttatccagttgaacttttgtctgcagatggagttccttaaccataaatctgcttcaagtgcagtc

SEQ ID NO: 51163 - DNA, 457 bp, Gossypium hirsutum
  Clone ID: LIB3197-034-Q1-M1-A11
ctctcttcctcctccaccatcatcatatgatagacgtctaaagcatctgggcgctgcaaaaagtacacaatctcccacttcctcttttacactcccttcatttttggtctttcaaaccccataagcccttttcactcctttttatactctcattttacgtttatttcttctttctttcatagatccaggccttcttcttcttcttcttcttcttcttcttcttctatcaaagttaatataggcaaatataagagaagaaatcgaattaaagttgatccgtgaaactagataaagaacagtacgatttgttttgaccaaagcacattcgagccatgtcatttattggtacccaacaaaaatgcaaggcttgtgagaagactgtttatccagttgaacttttgtctgcagatggagttccttaccataaatcttgcttcaagtgcagtcattgcaaagg

SEQ ID NO: 51164 - DNA, 449 bp, Gossypium hirsutum
  Clone ID: LIB3197-034-Q1-M1-A12
gttttcaccgaaataaaaggacctttgcccctccccaccgtttttcaaccctcgtcatcggaagagctgtcctttttctctctctatattttctcatctccttttccaccgccgttgatctcgatccgtatccccgttttcaaaaaagctccaaaaagatggccaatgctgcatcgggaatggctgtgcatgatgattgcaagttgaagttccaagaacttaaggcaaaaagaacccaccgctttattgttttcaaaatcgaggagaagcagaagcaagttatcgtggagaagcttggtgagccaactgagagctatgaagattttactaaatgtcttcccgctgatgaatgtcggtatgctgtgtacgattttgattttctaacagccgagaacgtcccaaagagcagaatctttttcatcgcatggtctcccgatacatcaaggatc

SEQ ID NO: 51165 - DNA, 250 bp, Gossypium hirsutum
  Clone ID: LIB3197-034-Q1-M1-A4
tttgtacaaaaaagcaggctggtcccgtcccggatttcccgggttcttaagccggggcgacagattaagactgtctcaaatccaaaacgaaaaaaactaaccattttactttataggcgggcccctcaaactatagttttttaactaaaaaaaaaaaccccttttttttagttaaaaaaagtttatttagcctgatcagtttaccagatgtcttttcagtgacttttgctcttcataaatccatctcaaa

SEQ ID NO: 51166 - DNA, 440 bp, Gossypium hirsutum
  Clone ID: LIB3197-034-Q1-M1-A5
gagagagagagagagagagagagagaaacacagagagggagaaatggtttctctgaagctacagaagcggctctccgcgagcgttctaaagtgtggaaaaggaaaggtttggctcgatcctaatgaagtcaacgagatctctatggccaactcccggcagaacataaggaagttggttaaagatggttttatcatcaggaagccaaccaagattcactctcgatctcgtgctcgtcgcatgaaagaaagccaagagaaagggacgtcactctggatatggtaagcgcaagggtacaagggaggcaaggttgcccacaaagatcttatggatgagaaggatgcgtgtacttagacgcctactccgcaagtacagggaatcaaagaagattgacaagcacatgtaccatgacatgtacatgaaagtcaagggtaatgtgttt

SEQ ID NO: 51167 - DNA, 353 bp, Gossypium hirsutum
  unsure (1)..(353): unsure at all n locations; Clone ID: LIB3197-034-Q1-M1-A6
acaggttgctaagagcatcaagattgtaatgacttcaagattagcatcagttgtaatctcccttgacatggaaagaatccaagatgcgcaattgcatatagatgcaaatgttgtgaaagaatcaattttgcaaacaccgaagctgaaactaaaggagcagcatgtgaaggttttggatgttaaaaagttggaagtagttcctccagctgatagaagtagaattcattttgaacttcattctcttaaaaatctgcttccaactggttgtggtaaagggcattaaaaaatgttgaaacgtgttgntattgctgagaagaaaaaagacaataaaagtcagaacaaagaagcgaaaa

SEQ ID NO: 51168 - DNA, 214 bp, Gossypium hirsutum
  unsure (1)..(214): unsure at all n locations; Clone ID: LIB3197-034-Q1-M1-A7
accggttcctcaatctctctaatcctgactttcttccccatcaaacacaccttcgattntcccaaggttgtagaagatggcagaaggtgaggatattcagccacttgtttgtgacaatggaactggaatggttaaggctggatttgctggggatgatgctccccgagccgtattccctagcatcgttgggtcgccacgtcacaccggtgtgatg

SEQ ID NO: 51169 - DNA, 344 bp, Gossypium hirsutum
  unsure (1)..(344): unsure at all n locations; Clone ID: LIB3197-034-Q1-M1-A8
tcgtctcgtcccacgcccgtccgagggacctggnttacttaccgtgcgagcgttttccaaccctggagcagactcgatcatgcggcaagtgaagacgctgccaacatacttcgtcccgtggcccactacnnactattggcaaaagagaaatcgttgacttgtgcccttggaccgtatctnaggaagctttngctgataacnnngtaccggtcttcaaggggtttccttgttttcaaacgctgttggtgggagggcactggatctggtcttggttccctccttttggagcgtttgtctgttgattatggcaagaaatccaagttgggtttcactgtctacccatc

SEQ ID NO: 51170 - DNA, 407 bp, Gossypium hirsutum
  Clone ID: LIB3197-034-Q1-M1-A9
gtcttcttcattctcactctctctccactgaactcttgctaaacggtatcgttttagtcagtctttcatcaatggcgaaagaaccggttcgcgtcctcgttactggagctgcaggacaaatcgggtatgctcttgtacccatgattgctaggggagtcatgttgggtgctgaccagcccgtgatccttcacatgcttgatatcccacctgctgcggaggctttgaatggtgtcaaaatggagttggtggatgctgcttttcctcttctaaagggtgttgttgctacaactgatgttgttgaggcatgcactggagtcaatgttgctgtcatggttggtggtttcccaaggaaggaaggaatggagaggaaagatgttatgtcaaagaatgtgtctatttacaagtct

SEQ ID NO: 51171 - DNA, 351 bp, Gossypium hirsutum
  unsure (1)..(351): unsure at all n locations; Clone ID: LIB3197-034-Q1-M1-B1
acgaaatttatttcccctattcttctctgttgtttttccattctttgatctctgttaattcgctctttcgttttctttattctctttcccttcctttcttgtcctttcgtaacaaaccccagacactgccgcgccatcaacaccttccggcgtcttacctccgatcaaagttttgggtgcacagaaagacgctacactaggttttctctgcccgttctggtttttgtgattntttgaatttctctgcttcatcggtgactgatttcagtccagatagcctactggtctcgtggataaaaactgcttctggatatgtagactctctgtcataatactgtttagtagatcgtc

SEQ ID NO: 51172 - DNA, 452 bp, Gossypium hirsutum
  Clone ID: LIB3197-034-Q1-M1-B10
cctaagtcacttttcattttttttttctgaaaacacaacagcagactcagcccctgctctaccctgtccgccgcctcaaaggatttgaagccccttcaactccgatctgatcggggcaaataaggctccgtcttcctcctcgcaggtgcgacgtgcgcgaacgtgcggggagagtgacaaccactggcacacacgcacggtgagggcccgatggttgcggcgccgctgaaactgctactaggaaaacgaaggtttctcttttgtggacgtcggccattcatatcaacccaaggcccgaaagaattcaaagacactatattgtgattctctctaccgtttctgtttttgggatttttggactcccttgcttaatcagtattgtgtccaattcaaaaggatgaagatagcagtggaagggtgcatgcatggagatctcgacaaggtctacgaca

SEQ ID NO: 51173 - DNA, 421 bp, Gossypium hirsutum
  Clone ID: LIB3197-034-Q1-M1-B11
cctcgtttcgctcctttaacattgcataccgccaccaaacacagtcctacatttttggaacttctcttctcttctctttccaaaaagtaaaaaccagaaagagatccaaaaaataatggtgcacggttttattagtccatggagaagggtgttatcggaaactacatattctctgcgacgggggcaatttggtcgacgacgctgcttctctctggtggctcacaaagctgagcttgataaaaacaatatcgattctgttcctaaattgcctccctttgattactctccgcctccttataccggtccttccgccgttgacatcctttccaaacgcaaggagtatctcagcccttccatgttttacttttaccagaaacccttgacgtagtggatgggaggatgcagtatttgttcgatgaga

SEQ ID NO: 51174 - DNA, 420 bp, Gossypium hirsutum
  Clone ID: LIB3197-034-Q1-M1-B12
aaaacccattagctaaaaatgcactgggttctttctgtgttgcttgcagttatcggagttactgcactgctcgttgtaactccggtaagtgggtaccgtccatggccgtacgtaaaacccaacagctccgacttaatgttcggaggctctaagaaatttgagggctcatcggagtttgtacatatgagatatcatatgggtccagtccttactgctcatatcaccatccacccaatctggtacggccggtggcagaaatcacagaagaaaatcatccgtgagttcatcaactcgatctccgccgttgattccaaacacccttcggtggctgggtggtggaagaccgtacagctttacaccgaccaaacgggagccaacatttcccgtacggtgctattaggtgaagagaaaaacgatcgt

SEQ ID NO: 51175 - DNA, 393 bp, Gossypium hirsutum
  Clone ID: LIB3197-034-Q1-M1-B2
ccgatatcgtctttctcaaaaccagatccaaaagcctgcagattcatccgctgatggccgacgaagcgaaagccaaaggcaacgccgccttttcctctggtgatttcaacgccgcaatcaaacacttcaccgatgctataaacctttcccccaccaaccacgttctttattctaaccgatccgctgcgtatgcttctctccatcaatacgagtccgcattgtcggacgccaaaaagaccgttgagcttaaacctgactggtctaaaggttacagcaggctcggcgcggctcacctcggtttgcaccaatatcaagatgctgtttcagcgtataagaaaggtctggagattgatcctaataatgaagctttgaagtctggattggctgatgctc

SEQ ID NO: 51176 - DNA, 92 bp, Gossypium hirsutum
  Clone ID: LIB3197-034-Q1-M1-B3
gcaaagtctttggtttttttttttcaatcacttttcaaccagaactggttttttccttcctttttttccactgttcattacgggttgggttt

SEQ ID NO: 51177 - DNA, 288 bp, Gossypium hirsutum
  unsure (1)..(288): unsure at all n locations; Clone ID: LIB3197-034-Q1-M1-B4
tttcagtcactctaaaatcctttccgttaaacaaattataaaagattccaaattacaatcatggaaaagaaaaagaacaggaaaggtggaaagcaaaaaaaacaaaactgagcattcccattatcatgatgggttgataagttttttttttttccagtgcagttggaatctcaaaccctgaagcctttgctgttccttcttcctctagccctctcaaatttccttgcttttgaccgcacatatggcttggtgtggctgtgtggcacaccangagcaggtccgaagtgc

SEQ ID NO: 51178 - DNA, 451 bp, Gossypium hirsutum
  Clone ID: LIB3197-034-Q1-M1-B5
gggtgtcttaataaacgccttcgatttactttcggtttccatttacttctttatgtctacgtttttgaatttttagtaagcgaaaatgagagagtgcatttcagttcacatcggtcaggctggtatccaagtcggaaatgcctgctgggagctttactgccttgaacatggaatccagcctgatggccagatgccaagtgacaagactgtcggaggaggtgatgatgcttttaacacctttttcagtgaaactggtgctggaaagcacgtccctcgtgctgtctttgtggatcttgagcctactgttattgatgaagtgaggactggtacttaccgtcagcttttccaccctgagcaactcatcagcggcaaggaagacgctgccaacaacttcgcccgtggccactacactattggcaaagagatcgttgacttgtgcttggaccgtatc

SEQ ID NO: 51179 - DNA, 418 bp, Gossypium hirsutum
  unsure (1)..(418): unsure at all n locations; Clone ID: LIB3197-034-Q1-M1-B6
cattacccaaacctccctttcccccccttttttggtttatcataaacaatcgtcatagcattaacatacagctaggatctttcttttgtttttttttgggggaaaaggttgtgtttttaacgaaaatgggttccatttctttcgttaattctcaaaccctgaagctattcccttctttcaattcctttcttcattctaagcaaccctgcattgtctccatataccattattcccataaagtggcactggcacccttcttgtctctccccaaacccaaagatggctcttttcgtcttgctgctgaacttatcaccaactctgttccctcaagaaatggaaattatactgtgggtgattntatgaccaggaaagaggatttacatgttgtcaaaactacaacaagtgtggatgaagcatt

SEQ ID NO: 51180 - DNA, 438 bp, Gossypium hirsutum
  Clone ID: LIB3197-034-Q1-M1-B7
cggacgcgtgggcggacgcgtgggggcttctctgcctttcatcttcttgttatctttctttataatctccacaacattgacgtcagccggcgccgccgccgccaccatcaaactctccctctctcccttccctcacccttcttcctcccatccttaccaaattctcaacaacttagtcacttcttctgttgcaagagcccaccacctcaaacatcccaaagccaaggccgataatactacctcttctcttctcagggctcccctattttctcacagttatgggggctacactatctccctcaaatttggaactccgcctcaaacccttcctttcgtcatggacaccgggagcagcctctcctggttcccttgcacctctcgttacctttgttccaatgcgcattcccaatgttgaccctgcaaaaatccccacttttg

SEQ ID NO: 51181 - DNA, 455 bp, Gossypium hirsutum
  unsure (1)..(455): unsure at all n locations; Clone ID: LIB3197-034-Q1-M1-B8
gtcttcttcttttttaaatctaatttggtgtgtttctattgatcagacagaaatttgataccttgggtcttttttatttttctcttatagctctgaactgctttttttttttttgtgataaaattaaaaaattgtgatcactgagtagcttatgacattgaaaaccctaatgctagagagacccagatcggtttctttgtacagctatcaatttatgagccacctcgagttgcagttctttctatagtcatcatttactctatctgtggaatactttcccttgttttccaggccatttacatgcaaatttgtgctctacattgtcgatctccgagagtaggcatcgatgtcaatcatatgtggcctcccactcctagaatgtatttactgcctagcttgtgctcgatgggcatggaatcgatgcctgcataccgncggccacgatagtgtaacat

SEQ ID NO: 51182 - DNA, 426 bp, Gossypium hirsutum
  Clone ID: LIB3197-034-Q1-M1-B9
attttattatatattctaaatattttatatatttttatatttatatatgagtattatttttatatttatatattattattatatatatatttatttctattttttgtatacattatatacaatacaaaaaaacaaaaaagtaaagtatggatattgatccaattcatctcattaatatttgtagtacaatccttcagtcgatttcgcttcatttagttcagttttaatttcggtttatgaaatttcaataaaattcaaattaataaggagtccttatgtcacgttaccgagggcctcgtttcaaaaaaatacgccgtctgggggctttaccgggactaactagtaaaaggcctagagccggaagcgatcttagaaaccaatcgcgccccggtaaaaaatctcaataccgtattcgtttagaagaaa

SEQ ID NO: 51183 - DNA, 361 bp, Gossypium hirsutum
  unsure (1)..(361): unsure at all n locations; Clone ID: LIB3197-034-Q1-M1-C1
caaggggttgccggtggaatcgacgcgctcgttgagggccaangaaggaaggaggaagagagagaganagataaaaaggagaatctgcttcaaagtttcaaactttcccgtctcatatctaatccccaatttctctcttctgctctaggttccttcctgttctcttaggattcttgtggtctgttcaaagcgtcatggcatcgaagcggattttgaaggaactcaaggatttgcaaaaggatccacccactttttgcagtgcangtcctgtagctgaagacatgtttcattggcaagcaacactcatgggcccttccgatagcccttatgcgggaggtgtatttttagttagtattcattt

SEQ ID NO: 51184 - DNA, 451 bp, Gossypium hirsutum
  Clone ID: LIB3197-034-Q1-M1-C10
ctctggttcggagtttggaagcgcaaggcgtgccatcaaaacaagcggaggcaataacatcagcaatcacggaagtattgaacgacagcttggagaatgtgtcccagtcctttgtttcaaaggcagaaatgcagaaatctgagatgcttcaagaagccaatttgtccaaagtttaaatcggaagtaaaaagttcccaggagcatcatttttctatgttgcaacgtgaaactgagaaacttcgaggtgacattgagaagatgcgaagtgaactaaggtatgaaattgataaggtcactgcagggcagcgtctggatttaaatcttgaaagagggcgcatacgtgatgaactggccaatcagaatgcagaaactaccaacctgacaaacaagctagatagggaaattcatgcattaagagcccaattagaagctgcgaaatatgatgtaatta

SEQ ID NO: 51185 - DNA, 444 bp, Gossypium hirsutum
  Clone ID: LIB3197-034-Q1-M1-C11
ctctctctctcatatctctctgtttatttttttgggttttccttttgtcggcttcttctcacctgttgttcttccattttttaatcaagtccccccccctctcataacctctccctctaacaagccaaaggccccaagcagattctatttgttctaacatggagaaaagccatgaacttgaactgacccagatgaggaaatcagtagagaaacttgggttttcaacagagaaatacggggatccgacactcatgagattcttgattgcaagatcaatggacacagataaagcttcaaagatgtttgtccagtggctgaaatggaggtcttctttagttcctaatgggttcgttgtagaatctgaagtgcctgaccaattagaagccagaaagatttttttgcaaggtttgtcaaagacaggatatccagtgatgattgtccaag

SEQ ID NO: 51186 - DNA, 448 bp, Gossypium hirsutum
  Clone ID: LIB3197-034-Q1-M1-C12
caattctcaaaaccctaatttctctgcttttccttttgcttaatcaatcgatcctcgtcaatggccaacagtaatctccctcgaagaatcatcaaggttcctctttcgatatccgtttggtccttttcgatttctcctagttgtttgttttccgagaaacctcaagaaaatcttggttctttttactttttatttttcatcttctgttgtacttttgggttttagagtttagttttatagctgaattgtttaaattttgatgaaccaaaagcctctgctattttcttttggatcgtcttttttgattggcgaaagcttttttctgcctccattttttgtgtgtttttagaaattttcttggttacttctgtttatttttctttgatctaaacaggaaactcaacgtctcctcagtgaacctgcacctggaattagtgcttcaccatca

SEQ ID NO: 51187 - DNA, 417 bp, Gossypium hirsutum
  Clone ID: LIB3197-034-Q1-M1-C2
cttacatttaaggcttacaaacatgtttctgcactaagagctactgctctaatgtctaatgaagtgaaacctgagcaattcgcggttctcgttagagacttgccgaatgccacttcaggtcaaactcgaaaacagcaggttgatacatacttcaaatctatatatcctgagacattctacagatcaatggtggtcactaacaacaaagaggttgataaaatctggggagagttggaagggtacaagaagaagcttgcgcgcgcagaagccatatatgcactgtcccagggaaatggtcaaggcacgagaccaaccaacagaaccggcttccttggtctctgtggtaaaaaagtagacagcatagagtactacaatgaaaagattaaggaattgacacaaaaattggaagctgaacaa

SEQ ID NO: 51188 - DNA, 454 bp, Gossypium hirsutum
  Clone ID: LIB3197-034-Q1-M1-C4
aaacagttgaaatatctctctcttcactttcttctctgttcaacgcagggtgaaaggcggggaggccgtatacaatctctcttgcgctcttctcgtagaatggatcagattcaacatccaactgtcatgcagaaggtagctggccagctcctttcttctagcatttcccgagattttcaagggtatgatgggtctttcaggaggcctgccctataccaaggacattttgcatatgggaattattccaatgctggaatgcactatcctattgttccatcaacagctaccgccatttgtgttcaagcccctgcagagaaaggatttaccagctttgccattgatttcctcatgggtggagtttctgctgctgtgtcaaaaacagctgctgctccgattgagcgtgttaagcttttgatacaaaccaggatgaaatgatcaaaactggtaggctctc

SEQ ID NO: 51189 - DNA, 456 bp, Gossypium hirsutum
  Clone ID: LIB3197-034-Q1-M1-C5
attgtcttctccataacattcgtctctcagatccttgcctcttagatcatcaaatccattcctttttttcaccaaaacatgagggaaatcataagcattcatataggtcaagctggtattcaagtcggtaactcatgttgggagctttactgccttgaacatgaaatccaacccgatggaatgatgcccagtgacacctctgtaggtgtagcaaatgatgctttcaacactttctttagtgaaactggttcagggaaacatgttcctagagctgtgtttgtggatctggaacctactgtgatcgatgaagttaggactgggacttaccgacaacttttccaccctgaacagcttatttctggcaaagaagatgctgccaataactttgccagaggccattatacaattgggaaggaaattgtggatctttgccttgaccgtgttaggaagttagct

SEQ ID NO: 51190 - DNA, 432 bp, Gossypium hirsutum
  unsure (1)..(432): unsure at all n locations; Clone ID: LIB3197-034-Q1-M1-C6
gaggaaaggaattatattttgggtatgattaagaagattaaagccactggctgtaatgttttgttgatccaaaagagtattctgagagatgcagtcacggatttgtcattgcattatttggccaaggctaagattatggttgttaaggatgttgagagggaagatattgagtttattaccaagactttgaatggtttgcctattgctaatattgagcactttcgagtggagaagttggggcacgcagatcttgttgaggaggtttcgctcggngatggaaagattgttaaggttactgggatcaaggatatgggaagaacaactactgttttagttaggggttcgaatcagttggtcctcgacgaagctgagaggagtttacacgatgccttatgtgtggtcaggtgtttagtgagtaaaaggtttttgatt

SEQ ID NO: 51191 - DNA, 456 bp, Gossypium hirsutum
  unsure (1)..(456): unsure at all n locations; Clone ID: LIB3197-034-Q1-M1-C7
ccaaacatatcacaataaattaggtattccaccttttattttttcccccaaacacgcatgcaaatcgtttttccttatctaattcttttctgacacacacacaaatttcgaagctctggattccacctcttcccgtcctcgccgacggtgcttatgccggttggtttccagattgcaccggacttggatttaaagggatttagctttcctttcaagacatggagaaagcctgcttctggtcaaattgcaaccttttccgggtttttttattccaagaagtacttgactggcggtttattgtccatggagattctcttttggtttcttttgtcaattgcacttagtgcccagtctcctcttaatactcaacacggagccgcaatgaattntgttttctaagataggtgctggatctttagcacacttgttgcattgttgatacaacatccagtcatg

SEQ ID NO: 51192 - DNA, 464 bp, Gossypium hirsutum
  Clone ID: LIB3197-034-Q1-M1-C8
cggacgcgtgggcccaaatcctctgtacctttgttttttcttccaatccagacagcacccaattccatggccacctcttccccacgtgaggataatgtctacatggcgaagctcgccgagcaagccgagcgctacgaggagatggtgaagttcatggagaccgtcgtctccgccgtcccctcctccgacgagctctccgtcgaggaaaggaacctcctctctgtcgcatacaagaacgtcatcggcgcccgacgcgcctcctggaggatcgtttcctccatcgagcagaaggaggaaggacgcggcaacgccgaccacgtctccgtcatccgtgagtacagggccaagatcgaggctgagttgtccgagatttgcgccggaatcttgaagctcctcgacgagaagctcgttccggcagccaagaccggggattccaaggtcttttatctgaaaatgaagggaga

SEQ ID NO: 51193 - DNA, 461 bp, Gossypium hirsutum
  Clone ID: LIB3197-034-Q1-M1-C9
cggacgcgtgggtctttattgctctgaaaactttctctcttccaaactccatctgtcgatgcttccctaatctggttcgctcagcttatcatgccgtgcttgggtctctgcataatcaggaacgcccatttccaggtaaaattcctctcctcttcttagcatctctgttgcaaggatatgtgcaaggttgtttgcagatcttggtgtgtgaagaaatctgatattttaaacttctagtattttctgttgtatatcataaatatatgcccctaccattgatctgtcatgatcctttttgttgcatttcttgattattgcgagggaatctccttcaaaaatgagtgcctgccaaccatggtcaactcctacttggactgctttcctacaggcaattgcttcagcagcaaaagcagatggaactccattgtggatttctgagcaggataaaagaattttccttc

SEQ ID NO: 51194 - DNA, 386 bp, Gossypium hirsutum
  Clone ID: LIB3197-034-Q1-M1-D1
cccacgcgtccggagaagccagtttcaatcgtccctcaagagaaactgtcacgaaaaaagacattgggtcttcccaaatcttggctttgcattgatggcggatctcaggtcagcatttctcaatgtgtattcccagctcaaatcggagctccttcaggatccttctttcgagtttaccgatgattctcgtcaatgggttgaacggatgctggactacaatgtgcctggagggaaactgaatcgtggactctctgtgattgatagctaccgcctgttgaaagatggaaaggaattgacccaagatgagatttttcttacaagtgcgctcggttggtgtattgaatggcttcaggcatattttcttgttcttgatgacatcatggaca

SEQ ID NO: 51195 - DNA, 441 bp, Gossypium hirsutum
  Clone ID: LIB3197-034-Q1-M1-D10
cttcatttcccagacccttttctctgcttcctctctatatttttcatttgtttgttgtttatatggcatctcaagccagcctcctccttcaaaagcagctcaaagatctttgtaagaatccggtagatgggttctcagccggattggttgatgacagcaatgttttcgaagggagtgttacaattgtcggaccacctgatactttttatgaagggggatttttcaatgccatcatgagctttccacctgattacccaaacagccctccaacaatgaaatttacaacagacgtttggcatcctaatgtttatactgatggcactgtttgcatatcaattcttcatcctccgggtgatgatccaaacggctacgagcttgcaagtgagcgttggatgccaatccatactgtcgaaagtattgttttgagtatcatatcaatgc

SEQ ID NO: 51196 - DNA, 189 bp, Gossypium hirsutum
  Clone ID: LIB3197-034-Q1-M1-D3
gaaattccaaggaatcaactttctttccgttttaaaccggcccaaaaattacggtttcatttggccaggtggcaggaatttttaaccaggttttaagggaacccggatcaactgaagcgggagttattgaaaaccccatttaagggtgccaaccggccacggttggagggaaaggaaaattttggggca

SEQ ID NO: 51197 - DNA, 427 bp, Gossypium hirsutum
  unsure (1)..(427): unsure at all n locations; Clone ID: LIB3197-034-Q1-M1-D4
cggacgcgtgggttttatcagctaggaggtaagctcgggaaagatgacgatggggttcttagagttgattatgacgatgatatggatggtgttgaagtggtggaagccgtggcagaggggattaccgtcgatgaattgaccggtgatgatggtacgagctcatttaaggaattgataccttttaatggcgtcttgaacttggagggtcttcacaggcctcttttgtccatacagttgacgaagttgaaagatggtgttgcaatggggtgtgctttcaaccatgccattcctcgacggaacctccacttggcattttatgagctcttgngctcaaatctgtaacggtacttcgagctccgtcgttgtgccgccgtttcttgatcggaccacagctcgaaacacccgcgtgaagctcgacctcagtccg

SEQ ID NO: 51198 - DNA, 442 bp, Gossypium hirsutum
  Clone ID: LIB3197-034-Q1-M1-D5
atttcctgaagccttcgagcctgtgagagtcccatttcagaagggacttggccagagattccagcagcctcctgggacaggaattgacttaggtttctttgaattggatgatctctcgaaaccatcaccaggggaggatgttttccctcttgtaatttctgctgaaacatgtatgctgccgcattcatctgatgaacatgttggtgatcccacacaaagtacatcagcccacatgcaaattactcaagccattttagagaagaacggtaactctttccaagcaaaagtgatacggcagatattatgggttgatggagtccgctatgaactacgcgagatttatggaataggaagctcagcagcagcggaaggctttgatgatagtgacccggggaaagagtgtgttatctgcatgaccgaacccaaggatactgcggtccta

SEQ ID NO: 51199 - DNA, 453 bp, Gossypium hirsutum
  Clone ID: LIB3197-034-Q1-M1-D6
tggcagataagtttggccggacaaggacttttcaattagatgccattccgctaatcattggagcagttcttactgctatagcacagaatgtccagactatgataattggccgcttactggctggtataggtattggtataacatctgctattgtgccactttacatatctgagatctcaccaactgatatccgtggtgcacttggatctgtaaaccaactttttatatgtattgggattcttgcagcattggtggctggattacctttatcacggagcccagtatggtggaggggaatgtttggtcttgctgttatcccctcaattttattggctctaggaatgacatattccccagaaagtcctcggtggctgttccagcaagggaaaatttctgaagcagaaaaatctataggaacactatatgggaaagaaagagttcctgaggttatgt

SEQ ID NO: 51200 - DNA, 90 bp, Gossypium hirsutum
  Clone ID: LIB3197-034-Q1-M1-D7
cccacgcgtccgcccacgcgtccgatccttttatattctctagaaaatgtaacttttttccttgtcgttaagagtcaatacttttatcgt

SEQ ID NO: 51201 - DNA, 452 bp, Gossypium hirsutum
  unsure (1)..(452): unsure at all n locations; Clone ID: LIB3197-034-Q1-M1-D8
atctccagctcccaaggtaaatatgccgatcagaaacatagcagttggccggcccgaagaggcgactcaccccgatgctctcaaggcagctttggctgagttcatctcaaccttgatcttcgttttcgctggatcgggctcaggaatggcttttaacaagttgaccgacaacggagcaacaaccccggccggtctcgtagccgccgctctagctcatggcttcggtcttttcgtcgctgtctccgttggcgccaacatctcaggtggccacgtcaaccccgccgtcaccttcggtgctttcgttggcgggaacatcactctcttgcgcggcattctttactggatcgcccaactcctaggctcaaccgtcgcttgcctgttgcttaagttcgctaccggcgacctggctgtaccagcttttggatgtcatcangtgtgggcgtgtctaacgc

SEQ ID NO: 51202 - DNA, 412 bp, Gossypium hirsutum
  Clone ID: LIB3197-034-Q1-M1-D9
cggacgcgtgggatatctgtagatgtcaggtgaactcctttctacaagtgagtgaccttccaattcgatcacatgttttacacctttcaagttatttaccggtggaagattatcattccatttccgaacaaatttgctagtcccaattttgtatctcagtgtaaaagatgtaatgagtaagcttcaagaatacgtagattacataaacgaaaatctaaacaagctatacacacggagtccggcttcaaaatatatcctccatgacgaaaaccttataggaagccttactttgactttcgacgaggcaacgttcggtgttgcttgtgatctcaattctccgggattccatgtattgtgcaaagcaactgaagaggctgttggacatgtgaaaccttactcaattaccggaagt

SEQ ID NO: 51203 - DNA, 144 bp, Gossypium hirsutum
  Clone ID: LIB3197-034-Q1-M1-E1
aaaccctaaccaattcttcattatttctttctaattcgtcgctttccgatgatttatttcgaggtttattttcagatctgatccacctcaaattggattcattttgaggaatggatgatgatagtgcagatggataaaatgtct

SEQ ID NO: 51204 - DNA, 451 bp, Gossypium hirsutum
  Clone ID: LIB3197-034-Q1-M1-E10
ctttatttatataaaggaaaacaatatttcttgcttagtccttctttgggttgtttttttctttggtttttcctcagatttctctcccgtttcttaaatttcatcgccttcttcttcttcttcttctttttatatctttctttccttcttgtttatatatagagagctgaagccagttctggtttgctttaaaccacaataaaaatggcttcttcactctcttttccatgccccaagatctcttcttttttgaaaacaaaccagcaaacccaaactcacaagggttctttgtctcttcctccaacttcaaatttcaactccaaatcttgcttgtcatttggatcttcaatccgcgtacctgcatcttcagcacctcagtggcctaatgatgggaaacaaactacagtcttcgcaagccatacgcagcttaacgaggttgctgcagagaaat

SEQ ID NO: 51205 - DNA, 439 bp, Gossypium hirsutum
  Clone ID: LIB3197-034-Q1-M1-E11
tgtttttgctctttacggactcatcttcggtatgatcctttcttctcgggccgggcaatccctatcttaatacattacattattccaagactcgttatattacaagttctcattacttttattcttctttttatatctttctttccttcttgcttatatatatagagcttaagcctgttctggtttgctttaaaccactataaaaatggcttattaactctcttttttataccccataatctcttcttttttgaaaacaaaccatcaatacctaaactcacaagggttctttgtttctttctacaactttaaatttcaactacaaaacttgcttttcatttttatctttaatccgcgtaccttcattttaatctccttagtgtccttaatattgttaacaaacttcttttttctctttccattaacattttatactatt

SEQ ID NO: 51206 - DNA, 145 bp, Gossypium hirsutum
  Clone ID: LIB3197-034-Q1-M1-E12
aggatgttgaaattaatagtttaatctttctttcttatcctccataagcaaaaagaaatctacttctttgtttacgtatatttgtttgaattggaccgacccaattttcattaagaattgaataataagtttttgacttgaatcg

SEQ ID NO: 51207 - DNA, 371 bp, Gossypium hirsutum
  Clone ID: LIB3197-034-Q1-M1-E2
gattcacatactcagccaaaagggctctgctttggagttctttctttcttgattgcttctggcgtactttgggttcccactctaatcatggtatccaagcacaatccatcggtcaacaaaaaacggagcccactatctatatttgctgttattgggttgagctgtttcttctacattctgggagcatggcagcgaagtggtttcagcaaaggagatagtatagcattggcagtgacaaagcaggcagactgcagtatcttcacaaatttgaactttgaaacacatcacaacgatgtagagattgttgagccttccaaaccaaaagctcacgtgtttaagccgtgtgatgtaaaatacactgattacacccc

SEQ ID NO: 51208 - DNA, 250 bp, Gossypium hirsutum
  Clone ID: LIB3197-034-Q1-M1-E3
acccttccgccaaacccaaaccctaactggttttcctttggttttttggctgccactgactaatggagtccaaaattccaccagctccttccttattaagccatgagccgtttaagggtaactgacattttggacccttactttccctttttttgggttaaagaaacctcaattttggctaacaaggcccttaccttttccctaatttttgaaagcagaacatgaactaagttccgccctcgacctactg

SEQ ID NO: 51209 - DNA, 440 bp, Gossypium hirsutum
  Clone ID: LIB3197-034-Q1-M1-E4
gttttcttctgttacttcctttttttctctctcaaatttactactactctcttagctctcctctgtttcagtctcctttttatttccataataagatcacaatttttttctcatttattttttattttcacttcattttttctcagctttaacaaataaagaagaaaaagattcaagtaatttataccttatggaatatgatacagagaaaacatgaagagaattcaagccaatcgataacatttcatcacctacctgttcttcttcgtttcagaaacttctgttttttgaccggccatgggaaagaaagggagtggatggttctcgacggtgaagaaagtgttcaaatcttctcacaaagacttgcctgacaaaaaaagagagaataatgtggagaaatggccaaatgagggccccgatgtagtgtcgtttgaacattt

SEQ ID NO: 51210 - DNA, 449 bp, Gossypium hirsutum
  Clone ID: LIB3197-034-Q1-M1-E5
attttctcttctttttcttttttccctttttgtgatcttttctttttcttctttattttttcctataagatctttgatctttacctttttctttcaaaataaagatatgggtatcttgtattttgtgatttaatgtttgattttcactttcttttgtttctgggtattggctttttagccatttttattgcatttgaatttgttttgaggaaaaacatgtaatttttgagtgactatttaagcttgaaaatatctacttgtttatgtagatcttttcttcttttctttttttggtacttcagttttagtaaaacaaaaataggaatttactgttttctatttggttatttggtgacaaattagccatttttaatatccaatttcattgttttaagcttgaaagtatctaattgtttgcataggttttttttccttttaatctattttag

SEQ ID NO: 51211 - DNA, 424 bp, Gossypium hirsutum
  unsure (1)..(424): unsure at all n locations; Clone ID: LIB3197-034-Q1-M1-E7
gaggcttgctcgaaaacctatactctctgattatctctcttcttcgagccgctaggtcgtactgttttagcttcaagtctctcttttttgaaagttcctagttaatactggataatgggtaaggagaaggttcacatcaacattgttgtcattggccatgttgactctggaaagtcaaccacaacgggtcacttgatatacaagcttggaggtattgacaagcgtgtgatcgagaggttcgagaaggaagctgctgagatgaacaaaaggtcattcaagtatgcctgggtgctcgacaagttgaaggctgagcgtgagcgtggtatcaccattgatattgccttgtggaaagttgagacaaccaagtactactgcactgtcattgatgctcctggacatcgcgactntattaagaatatgatta

SEQ ID NO: 51212 - DNA, 454 bp, Gossypium hirsutum
  Clone ID: LIB3197-034-Q1-M1-E8
cgagagaattctacagaaagtgaaaaagaaagcgttttttttttctctgtaatttatgcaaacgggaaatctgccacaatctctctcgatgaattcgccttttggaggaccgagcgcgtcgaatccaactgttgccggagctccggcgaataaggatcggaaaatggcaacggcagagcatttagttctcgatctcagcaaccctgatctccgagaaaacgcacttctggaactatcgaagaacaaggaattatttcaagatttggctcctttcgtgtggaattcttttggtactatagctgcactcattcaggagatagtttcaatttatcctgttctctcacctccaaatctgactccagctcaatccaatcgagtttgtaatgctcttgctctgcttcagtgtgtagcttctcatccagacacaaggatgttattcctgaatgctcatata

SEQ ID NO: 51213 - DNA, 537 bp, Gossypium hirsutum
  unsure (1)..(537): unsure at all n locations; Clone ID: LIB3197-034-Q1-M1-E9
aatacccgactcactatatgggaaagctggtnacgcnnctgcaggtacccgtgtccggtaattctccgtggttcgatcccacgtccgtccgcttcttgcacttcacnnttttcttcccttgtgttaagacgctaatattagattcaaatatcgattagcaacgattganaatccatatannttttgtttacccagtttgtaanaatnncaatctttgaaacccatattcccattttnattgaaagggnagtgaattggagtcggagatnggagannacaaccagcaatccttttggcaattcagtgatcaacttaaggtccaaaattccaacttggcgaacctttcgctcaacgattcgatatggagcagtggttacgtttcgaagaggcctgacgagaggaggaattttgatatcagagtaggcggcgaactgaactccgtcaacagcttgaagccgaaggtcaccgatttcaactctttcagcaacgatgggtggaaaatcggagccaccagcaacgccaacattcggttcggtc

SEQ ID NO: 51214 - DNA, 386 bp, Gossypium hirsutum
  Clone ID: LIB3197-034-Q1-M1-F1
cttgaaggctgaagctatggagggtaaaaatgcgaatctggaagcggcgatcgaccagttgcttaatgttgagaagcagatgcggtttgccggcgatgtgattggctccaagaaagcggtctctgacattttgcagctctgctttgaagctaaggattggaagtctctcaatgaacagatcgttaatttgtctaagaaacgtggtcaacttaagcaggcagtgactgcaatggttcaacaagcaatgcaatacattgatgaggcaccagatcttgaaactcgtatagagcttatcaagaccctgaacactgtgtctgctggaaagatttatgttgaaattgagagagcaagattgatcagaagacttgcaaagattaaagaagaac

SEQ ID NO: 51215 - DNA, 352 bp, Gossypium hirsutum
  Clone ID: LIB3197-034-Q1-M1-F10
gataaagtctccccggccaaccagggctgaggccactgacgttgccaatgcagttcttgatggtacagactgtgtgatgttaagtggtgaaactgcggctggagcttacccggaacttgcagttcgaaccatggccaaaatatgcgtacaagcagaaagcacacttgattatggagatgtcttcaaaaggattatggaacactcaccggttccaatgagtccattggaaagcctggcttcttcagctgttagaacagcaaattcagcaaaagcagctcttatcttggtcttaaccaggggaggaagtaccgcaaaattggtggctaagtacaggcctggcatacccatttta

SEQ ID NO: 51216 - DNA, 444 bp, Gossypium hirsutum
  Clone ID: LIB3197-034-Q1-M1-F11
ttttgttttacattttcttattattgataaagaatccccttcaataataactttttcccactgcatgttaacgccgatctggagggctttacgacacgctattgctttcgccccaaaggctgagggaactctttgatgaacctctgtacatgatagaagaattgaaccctccttatcgcgggccacaaccccaatagccgctttactttgtctaccgtcgtatgctgcatcgaaattgattttgactaccttgtccactggctttgtccatatttttacagatatggaagattgcaacctattttaaccaactgcatcaagatctgaaatatagctatgaacaaatctccctacttcttttccagatttaccatgttttttaggcaatctattgttcctgtctccccagatggcccatactgcaacacaaaagaatcgatgctg

SEQ ID NO: 51217 - DNA, 451 bp, Gossypium hirsutum
  unsure (1)..(451): unsure at all n locations; Clone ID: LIB3197-034-Q1-M1-F12
aagggtggtgagaccagcacgaacagcatagcatctatctttgcttggacgcgtgggcttgcacacagggcaaaattggatgacaatcctaaactcttggatttcactgagaaactagaggcagcttgtattggaactgtggaatctggaaagatgaccaaagatcttgcactaatcattcacggctctaagcttgctagggacaagtacctgaatactgaggagttcattgatgctgttgcagcagatctaaaagcaagactttcttaagcataaatttgaaaatggtcgaaaatggaaaggggtggttttgcgggtttgcaggaaaaataataataaaaagcatcagtggaggtggcgtggatgaggtgaggatggcggttgtcaatagatgaatntaatcaccattttatgagatacagagacgagcactctctcacttgattcatct

SEQ ID NO: 51218 - DNA, 456 bp, Gossypium hirsutum
  Clone ID: LIB3197-034-Q1-M1-F2
gtcatctctgctgagaaggcttaccacgagcagctctcagttgctgaaatcaccaatagtgcctttgagccctcatctatgatggctaagtgcgatccacgccatggaaagtacatggcttgctgtttgatgtaccgtggtgatgttgttcccaaggacgtcaatgctgcagtcgcctccattaagaccaagcgcaccattcagtttgtcgattggtgtcctactggattcaagtgcggtatcaactaccaaccacccactgttgtccctggtggtgatctcgccaaggtccagagagctgtttgcatgatttctaactccaccagtgttgctgaagtcttctctcgcattgaccataagtttgatcttatgtatgccaaacgtgccttcattcactggtatgttggtgagggtatggaagaaggagaattctcagaggctcgtgaggatcttgct

SEQ ID NO: 51219 - DNA, 457 bp, Gossypium hirsutum
  Clone ID: LIB3197-034-Q1-M1-F3
ctctctgtagccgccgcctgcgtctctctcttcatctctctgaaccaaaaagtctttagcttttcgcttcgagagagaccatgttggtttaccaggatctcatctccggtgacgagcttctttctgactcattcccctacaaggaaatcgagaatgggatgctgtgggaagttgagggaaagtgggttgtgcaaggagctgtcgatgttgacattggtgccaatccttcagccgaaggtgctgatgaggatgaaggtgttgatgaccaagctgtgaaggttgttgacattgttgacactttcaggcttcaggagcaaccccctttcgacaagaagcagtttgtcgtgttcatcaagaagttcatcaagaacttgacaccaaaactggatgcggaaaagcaagagtccttcaagaaaaacattgagggagcaaccaagtttttgctttcaaaaatgaa

SEQ ID NO: 51220 - DNA, 428 bp, Gossypium hirsutum
  Clone ID: LIB3197-034-Q1-M1-F4
gaacttgacaccaaaactggatgcggaaaagcaagagtccttcaagaaaaacattgagggagcaaccaagtttttgctttcaaaattgaaggaccttcaatttttcgtaggagagagcatgcatgatgatggatgcttggtgtttgcttactacaaggatggtgctgttgacccaacatttttgtactttgcatatgcattgaaggaggtcaagtgctgaggtttgaagcaaagaaaaaaaaagtggttgctgaagaatttagtcctttttattattgcttttgtctcttgttttcagtactctgctaaagacataaattatttgtgggttttgatgtttttggtttaattggttggtggtttatcatggaatggtttctatttttatgggttggctaaacaataatttaactcttttgtctattact

SEQ ID NO: 51221 - DNA, 358 bp, Gossypium hirsutum
  Clone ID: LIB3197-034-Q1-M1-F5
tgttcttttcaccaaaactggatgccgaaaatcaagagggcttcattaaaaacattgggggggcaaccaattttttcctttcaaaatttaatgaccttacatttttcgtaggagagagcatgcatgatgatggatgcttggtgtttgcttactacaaggattgtgctgttgacccaacatttttgtactttgcatatacattgaacgatgtcaagttctaatgtttgcatcaaaaaacctaactttttcaactgttaaaacaactaattcatctaatacagctcttatcttggtcttaaccatgggaggaagtaccgcataatttgtggcttagtacaggcctggcatacccatttta

SEQ ID NO: 51222 - DNA, 453 bp, Gossypium hirsutum
  Clone ID: LIB3197-034-Q1-M1-F6
catcactctttttattttcactcacttcacctgagattttgttttcttttgtttttcagtaatggggaagattaagatcggaattaacggatttggaaggatcgggcgtttggttgcgagagttgctctccaaagcgaagatgttgagcttgttgctgttaatgatcctttcatcaccactgattacatgacctatatgtttaagtacgacagtgttcacggtcaatggaagcaccatgagcttaaagtgaaggactcaaagactctcctctttggtgaaaagcctgtcactgtttttggcatcaaaaaccctgaggaaattccatggggtgaggctggtgctgaatatgttgttgagtctactggtgtcttcactgacaaggacaaagctgctgctcacttgaagggtggtgcaaagaaggtgattatttctgctcccagtaaggacgcccc

SEQ ID NO: 51223 - DNA, 430 bp, Gossypium hirsutum
  Clone ID: LIB3197-034-Q1-M1-F7
ctcctcgaaccaaaaaaacagagctctcaaaatctcaccaaactagtatttgcaaaaactcgctaaaatcttttttgtatagtagtattttcaacatttaatttttttgctttactaaaaaattagttgacatgacttcctttgttcgccgtttaacggtcggttcaacgataccctacgttccggttcatcatcagaaggtttaaaccaacgattgagattcctgccttccctctgttgcctcacaataaccaacggccgttaggaatcgctctgagatcgagaaagtattggagagtggaggcagtggggccggttggaagatcggagggcggagatggcacgaagaaggcatgagggggaccaggaccaggcccatgctcgtattcattgggggaccggacgaccgaggtagagaggagagagagaa

SEQ ID NO: 51224 - DNA, 300 bp, Gossypium hirsutum
  Clone ID: LIB3197-034-Q1-M1-F8
aaacatagaactagaatttggttgggaagcaaatcaacaagtctcacaaaaagtaaatttaaagtccaaatttaagataattgtccaaagctgtaatgaaaactgatataattatctctgcaataatctctcatttcttcttggcagcagatttggtgaccttatcaccagttgagactttctccgaatacctaccactcagacgttttgctgtccgctacatgcgccagaccgttactctccgctctttgatgaaaattctgacgctgatcccaacttgttttacccttacgaaaattc

SEQ ID NO: 51225 - DNA, 415 bp, Gossypium hirsutum
  unsure (1)..(415): unsure at all n locations; Clone ID: LIB3197-034-Q1-M1-F9
cttttgctcactaactttgattttgatgtctattttcgctttctcaatcgccattgctaactccaaaactctcaagagagatgtnaaagccttaaatgagataaaggcatcacttggatggagagtggtatatgcatggattggcgaatatcccttgctgagaggagatgaagcaaagtgggttgtgcaaggagctgtcgatgttgacattggtgccaatccttcagccgaaagtgctgatgaggatgaaggtgttgatgaccaagctgtgaaggttgttgacattgttgacactttcaggcttcaggagcaaccccctttcgacaagaagcagtttgtcgtgttcatcaagaagttcatcaagaacttgacaccaaaactggatgcggaaaagcaagagtccctcaagaaaaac

SEQ ID NO: 51226 - DNA, 334 bp, Gossypium hirsutum
  Clone ID: LIB3197-034-Q1-M1-G1
gctcaacactcggaggacatctcagagatgcgaagctctttaactccataaattaaacgccccaaaatgtcaggactgaaactgagcctggtagcttcaatctacgtcaagccccgccaatgggtccgaacaataaccaccacccgcccttcaccttcaccttcactccgcctaactcggcgcatgactgcccttttctcaccctccacccattttagcaattcccttcttcccaaaaaaaacctacttcctcttgtgagatttgcctttcccaactggtttctcttcctcagcaaacaataaaggagctatcaacggatcgggtcccggatcg

SEQ ID NO: 51227 - DNA, 404 bp, Gossypium hirsutum
  Clone ID: LIB3197-034-Q1-M1-G10
gcatggagccgctcactaccagcctaacccattccatttccactcttccacccatccgcttcttcgcctcagctcaccgtctcccccctccgcagctttctgtctccaccgtccgccacctccgttcccgggttttgcgttttagtaatctgttgcctaaagcgacaacttcggaagaagcctcctccaccgggccaaaccgatatttcggtgaagatcgtgaccgcgtggtgacagtggaagaagttccggcggttgggaataataatgtcttcaatgaaaagctgccacttgaagaatctaaagtagagtcagctgccgatgaggactcgcagatgttcgagtttttggagaaacttaatatcaagcttgactctggagatggatattcagtcatattatat

SEQ ID NO: 51228 - DNA, 413 bp, Gossypium hirsutum
  Clone ID: LIB3197-034-Q1-M1-G11
ggcaaagcacagccaaaatgtcgtcgtttttgcaatcacttttggatccgaagaagagctggttagcttctctgcatatgaaagcccttaccacacgcctccgcaaatacggccttcgttacgacgatctgtacgatccttactatgacttggatatcaaggaggcgttgaatcggctgccccgtgagattgtcgatgctcgtaaccaacgccttaagcgtgcaatggatctctccatgaagcacgagtatctccccgaagatcttcagaaaatgcagacaccatttaggagctatcttcaagatatgcttgctcttgtgaagaaggagagagcagagcgagaagcattgggagctttgcctctgtatcagcgaaccattccttaagggttttcatgccgtatctcatagtca

SEQ ID NO: 51229 - DNA, 400 bp, Gossypium hirsutum
  Clone ID: LIB3197-034-Q1-M1-G12
cgcaaaggaaaacaaaacaaggggcgaaaccttaattccatcaaaataattcaaaggaaaatatctgcagaatcataatggagaattatctctttctgttctcgcttgttcttctctttggtcttttacccttttcctctcaaaccccaaaccctaaaaaccccaatcccaaacctccgctcacccaggcacacaccgagcttataaactatggttttccgatcggtcttcttccggcctcggtgacgaagtacactcttaaccaaacatccggtaacttcgccattgatctcggtggcacgtgcaagatcacgctcccgcctgacaactacctggctacttactcgaaacgggtaacgggaaagatgaaaacggaaagatagcggaactcgatgggatc

SEQ ID NO: 51230 - DNA, 390 bp, Gossypium hirsutum
  Clone ID: LIB3197-034-Q1-M1-G2
agcaaatccaaggaatagaagaaaatggcgaggtacgatagagcaatcacagtgttctcgccggacggccatttgttccaagttgaatacgccctcgaagcagtccgtaaaggtaacgccgccgttggtgtccgcggcactgacatcgtcgtcctcggcgtcgagaaaaaatctaccgccaagctccaggactccagatcggttaagaagattgtgaacttggataatcacattgcactggcatgtgctggcctcaaagccgatgctcgagtcctcataaatagggctcggattgaatgtcaaagccacaggctgactgttgaagatccagttactgttgagtatattactcgatacgttgcaggtcttcagcagaagtacactcaaagc

SEQ ID NO: 51231 - DNA, 349 bp, Gossypium hirsutum
  Clone ID: LIB3197-034-Q1-M1-G3
acccttccggcaggtgttgcctttgttggaggctttctttaacaattggttcaagggaagtccatggaggattgcttaaaacctggttgctttgcatccaacgttttcatccaaaggtctggctgcccatacccagaaaagcctgaatttaaataaagctagtccactttcctgatctcctctccgctgtggttttcaagtttctgaatggttaagaaccctcttgctagcatttgatctttgaattttgttttattttttcctatttgctggtgtaatttcgatgcctgcatcttgaaatgcatatgagaatacatttatgttattcatgaagagcagtcgttcattc

SEQ ID NO: 51232 - DNA, 297 bp, Gossypium hirsutum
  Clone ID: LIB3197-034-Q1-M1-G4
acaatagttctccatgcattctatagactgattgattttattggcctacaatacgactaacaagttccggaaacccgagtaaaccgccacgacaaccaaatgtttgactctgctgcattaatttgaaacataattcatcttcataggtgtaataggggtgtgtcagtgtcaccccccaattgcttatttcaagtataaaataaagtaagtctgggtttcctctcgtttctggaacttgttagtcgtattgtaggccaattaaatcaatcagtctatagaatgcatggagaactattt

SEQ ID NO: 51233 - DNA, 361 bp, Gossypium hirsutum
  Clone ID: LIB3197-034-Q1-M1-G5
cggacgcgtgggcccgaatattaagaactggcagattgaaagctatggaaaggcacaacagttccgcagaccaaaagttcacttgcgctgtagtcctggacaatccatctctttcattaaattcgccagttttggaactcctttgggaacttgtggaagttaccaacaaggcccttgccatgctcctgctacatatgccatcgtggagaagaaatgtgtagggaagcaaagatgtgtggtcaccatagccaacagtaacttcgggcaagatccatgcccgaacgtgttgaagcgggtgtctgtggaagctgtttgtgctccgatatcttcaacaacagcacaggcaaactggggaggctta

SEQ ID NO: 51234 - DNA, 394 bp, Gossypium hirsutum
  Clone ID: LIB3197-034-Q1-M1-G6
gcgaccgctgtgagaatcaccggaaaaagccacgtcaagccgggtaagttgataggaagaaaagagtgtccgttggtcacatttgatctcccctacctggctttctattataaccagaagctgctgttttacaagaacgacggtggtggtgagttcgaggacaaggttgaaaagctcaaggaagggctgagggtggtgttagaggagttttatcagctaggaggtaagctcgggaaagatgacgatggggttcttagagttgattatgacgatgatatggatggtgttgaagtggtggaagccgtggcagaggggattaccgtcgatgaattgaccggtgatgatggtacgagctcatttaaggaattgataccttttaatggcgtcttgaact

SEQ ID NO: 51235 - DNA, 451 bp, Gossypium hirsutum
  Clone ID: LIB3197-034-Q1-M1-G7
gtagctatccaggccgtgctctcactttatgccagtggtcgtacaaccggtattgtgatggactcgggtgatggtgtcagccacacagtgcctatttacgagggttatgccctcccacatgccattcttcgtcttgacttggctggtcgagacctcactgattacttgatgaaaattctgactgagcgtggatattccttcaccaccacagccgaacgggaaattgtgagagatgttaaggaaaagctgtcttacattgcccttgactatgaacaggagcttgagaccctcaaaacaagttcatcagtagagaagagctatgagttacctgatggtcaggttattaccattggtgctgaacgtttcagatgccccgaagtgcttttccaaccatccttgattggtatggaagctgcaggcatccatgagactacatacaattcaataatga

SEQ ID NO: 51236 - DNA, 405 bp, Gossypium hirsutum
  Clone ID: LIB3197-034-Q1-M1-G8
cactccttgtgcaccgggttcctatgaagttagtccagagaatgcaccttgcaagtctcctaacttacatatttgtatgccctgcagcattggttgccctgctgaaatgtaccaaaaatcgggatgtactttgaagtcagatcgagtttgtgattacaattgttctagttgtaactcagtggaatgcgtctcaaattgttcttcgaattctgaagctactaatggaagtaagaatgaaaggttttggtcactgcaattgccgatcattgtcgcggagattgcttttgctgtgttactgctgatcatcgtgtccttaactgcagttttatatgtccgatacaggttgcagaactgtcgctgcaaagcaaaagagtcgaagtccaagaaagctaatgagattgcttc

SEQ ID NO: 51237 - DNA, 436 bp, Gossypium hirsutum
  Clone ID: LIB3197-034-Q1-M1-G9
aattgtttgagctagctagctcttactcaaatggcaaccaaaacgatgatgttgcaaatattttcacttttcttctttttgttcagtatctgcaactccattttccttggtgctaatggagatgacaatggtggttggcaaactgcccatgccaccttctacggtggtgctgatgctaccggcacaatggggggagcttgtggttatggaaacctgtacagtcaagggtatggaacgagcacagcagctttgagcactgcacttttcaacaatggcttgagctgcggtgcctgctacgagctccggtgcaacaatgatcctcaatggtgcattagtcgaaccataaccgtgacagccaccaacttttgtccccctaactatgctttatctagtgacaatggcgggtggtgcaatcccccacgagaacactttgatt

SEQ ID NO: 51238 - DNA, 434 bp, Gossypium hirsutum
  Clone ID: LIB3197-034-Q1-M1-H10
ggcagctccttatccggaaccagagaccgcagggagctcaagcagccatgggagcttacaagtacgtgtcagagctatggaggaagaagcaatccgatgttatgaggttcttgcagagagtgaggtgttgggagtaccgccaacacccgtccattgtgcgagttaaccacccaactcgtcctgacaaggctcgtcgcttgggatacaaagccaagcagggttatgttgtctatcgtgtccgtgtgagacggggtggaaggaagagaccagtacctaagggtattgtgtatgggaaacccacaaaccagggtgtcactcagctgaaatttcagcgcagcaagcgatcagttgcagaggagcgagctggtcgaaagcttggaggccttaaggtcgtaaactcatattggatcaacgaggattcaacatacaaatac

SEQ ID NO: 51239 - DNA, 404 bp, Gossypium hirsutum
  unsure (1)..(404): unsure at all n locations; Clone ID: LIB3197-034-Q1-M1-H2
ctaatattttttttattgtcgtctccggcgttcgaagatcataaaaaaccggagtcgtttcaaatggctacgagaacggatctagatgggaggccaataaagccgatgacgatatgcatgatcggtgccggaggcttcatcggctcccacctttgcgagaaattgatgtcggagacgccgcacaaggtgctcgccttggacgtttacaatgacaagatcaagcaccttctcgagcctgactctctcccttgggctggccgtattcagttccaccgacttaacatcaagcacgattctaggctcgaaggcctcatcaagatggcagatctcgtgataaatcttgctgccatctgtactccggcagattataatacgcgtncactagacacgatttacagcaattt

SEQ ID NO: 51240 - DNA, 162 bp, Gossypium hirsutum
  Clone ID: LIB3197-034-Q1-M1-H3
gctggaagaaaaaatatgttttccaaacaaagatggagaggcaaccatccatgcaggttggtttgatgaacaggcttttgtttgctcctttttattccaacatcagggtcgtatcatgaacttgccccgtccttgtggagaaaaaaacctactatcaacttc

SEQ ID NO: 51241 - DNA, 523 bp, Gossypium hirsutum
  Clone ID: LIB3197-034-Q1-M1-H4
cggtccggaaattcgccgtggtcgatcccacgcccgtccgagacacagtgttacgtgctgtgatctgctatccattcgaagaactgtgagcagccgcgcactattcaagcgcgaagcttttagtgttgtggacggcgtctccaaaatggatcacttttgtccacagcattacaatggtagagttcgttaaagcgcttgaacacattgcgccagtgatctcaataacccgacgccgaaaccaaaattgggtctttggaaactatgacctttagctagagtcatgggtgacatggtattgcttccaaacggcaaagttttggtcatcaacggagcacgttccgggtcagcaggatgggacttaggaagggacccggtcttaaatccagtgttatacatgcctgataatgaaatcgagtcacgattcaagatactaaacccaacaaagatcccttcgatgtaccattccacagcagtattacttcgtgatggaagagttttagtgggtggaagcaatcctgatgcg

SEQ ID NO: 51242 - DNA, 453 bp, Gossypium hirsutum
  unsure (1)..(453): unsure at all n locations; Clone ID: LIB3197-034-Q1-M1-H7
gaagcaatctataatcaaaaccaaaaacccaaaatcatacagcagaaaaaaaattggtaacctgtttcatctgccccccttttcaacggcagtagcatataagggtcgtatctttcccagaggaaagcctccattgtttctttgtagagcaagaaattggaggcgaatcgtctggaattttaatcttttggggcttttttttttgtttttttggtagaagatgataagatggtggatttcttcttttcaattagctgagctgtttattagctcggtggttcatcttttatatgggttttatgtgtacagcactgctgttgctgcggacctttcacaggctttgagtgaatgtgttttcaagtctaatgtaagtttagaggtgaaaaagcaagatcccagtaagtctactgttgatgatctgcctnctattgttttggttcatggcatttttgg

SEQ ID NO: 51243 - DNA, 237 bp, Gossypium hirsutum
  Clone ID: LIB3197-034-Q1-M1-H8
gtactttgtcactctacgagacagggattggtattggagagcttttcttggtgagggttaacacagagaccatcctgcacgtaatccatttgttcccatcggtataagttttgaaggaatcaaatttccaaagagtacaggtgtggtttcaggctttgccaacaaacgttgttgtctatcggttttcatcttgtgtatttacgtggtttccctgattacaacattcaaaatgaattc

SEQ ID NO: 51244 - DNA, 436 bp, Gossypium hirsutum
  unsure (1)..(436): unsure at all n locations; Clone ID: LIB3197-035-Q1-M1-A10
ccaagatccgacattcttgtatcgcaatctctgtgacggatcaagccaagctgaaaccagcactgccgaagaaacgctactcttcactacagccgtcaacaccatgcggtggccggcggtgaaaagtggggggctgggggtggttgcgatgacatacgtggcggtagactatttacgcatcctatccccaacgtggcacgagcgtcttcaacccgtactctggtctttactcgccctcgtcgccgtcacgcgcgtccccttttaccgtcactggagcgccgagtttcgagctgccatctctttccttgcttcgatgatatttatgctctcagctcttctttttgaagcctgcacagttcgtttcgttgccgttgttcttggactcaattggcacaatggtaggcctnctcttnctgatactggtcaatggttgctc

SEQ ID NO: 51245 - DNA, 390 bp, Gossypium hirsutum
  unsure (1)..(390): unsure at all n locations; Clone ID: LIB3197-035-Q1-M1-A11
gaagttccagaaagaaccaagaagagccctggaggtccctggacattttgtgggctgttgcctttatttgatcctccaagacatgatagtgccgagaccatccgtagggccttaaaccttggagttgatgtaaagatgattacaggtgaccagttggccatcgcgaaggagacaggaagaagacttggtatggggacaaacatgtatccttcttcatcattgttgggtcgtgaaaaggatgagagtgaagctcttccagcagatgaactcattgagaaggcagatggctttgctggcgtattccctgaacacaagtatgaaatcgtaaagattttacaagaaaagaagcatgttgtgggaatgaaccgagatggngtgaacgatgcacct

SEQ ID NO: 51246 - DNA, 341 bp, Gossypium hirsutum
  Clone ID: LIB3197-035-Q1-M1-A12
tgaggttcctcctgctgcaaacccttactgctgattttctgtatcatttggctgccaagatggacttgaaaatggaaattttttcccttggtgatctgtcaaaaacaattgggaagattttgacagacatgtcaagtctctatgatgtagggcgtcgaaaacggacggtggggttattacttgttgaccgtacccttgaccttcttactccatgctgtcatggtgattcacttgtagatcgtatcttttcaactctgcctcgtaaggaaagaacatctgcctgtgcatgtatcaaatgctcacaggcccaacttaaacctggtccttctagcctagcacgt

SEQ ID NO: 51247 - DNA, 361 bp, Gossypium hirsutum
  unsure (1)..(361): unsure at all n locations; Clone ID: LIB3197-035-Q1-M1-A2
accggccganttccggtcgccacgcgtacggtctgacaccatccccggcctcttctttattgggtagtcttggatcattctctgatgatataaaccgattgttgcaactgtacgaggaggaagatgatgccactagtccattaaaagagtcagctgtgctgaaacctgagattgatggataaaagcctaaatcccagtagtttaccttgaaattcccgaggactattttgtgactcatgagccacaagacaatcatttcagggtttgatttatgcaaagtttctacctcagctaatgctgacataaattatcaattggattatcatccatttgatttacaacaagattttgaccatgggca

SEQ ID NO: 51248 - DNA, 391 bp, Gossypium hirsutum
  Clone ID: LIB3197-035-Q1-M1-A3
agcgctagatgtcttaaatgaatggcttaatgtgcttcaatcgattcaaatcccttttgctcttatcccactactttgtttggtttctaaggagcaaatcatgggtactttcaagattggctctgtgctcaagacaattgcatggctcgtggctgtactggtgatagtgatcaacgggtaccttttatttgacttcttctctaacgaagtcactggcgtaatgttcacaagtatagtgtttgcatttaccggcgcatatatcgcatttattttctaccttgtttcttggggttttgcttcatccgcttggcgccgcttgtcaccctcgaaataagcagggaatccagtgatcaatcttacccttctcaagccacgagatcagcctatcgag

SEQ ID NO: 51249 - DNA, 127 bp, Gossypium hirsutum
  Clone ID: LIB3197-035-Q1-M1-A4
gcttgttggccttcacttatttccacatcaatttcattatatgtaattttactcctaaaacatttgttttcgtgataatattttttaaatagacttttatttaaaaaaaaaaaattttggtgtgtgg

SEQ ID NO: 51250 - DNA, 437 bp, Gossypium hirsutum
  unsure (1)..(437): unsure at all n locations; Clone ID: LIB3197-035-Q1-M1-A5
cgcgagactccccaccaaccatttcctccccgatggcggctttttcgtttttgccctccgcccatattgcgcctaaacccacgcttcatttcatcaaagcctccacttccgatctccccaaaacccctccatcaccgatcctgcctcctccgatgaatcctactctctcgacgagatcgtttaccgatctcaatctggctccctccttgacgtccagcacgacatgtccgccctcaaacacttcgacggcgcttactggcgaaacctcttcgactcacgtgtcggaaagactacttggccgttcggttccggtgtctggtcgaaaaaagaatgggtattacctgaaatcgacgatgatgatatcatctctgcttttgagggtactctaacctcttctgggctgaaacgtatggcaaagacttcttangaatgaatga

SEQ ID NO: 51251 - DNA, 435 bp, Gossypium hirsutum
  Clone ID: LIB3197-035-Q1-M1-A6
gaaactttgaaggacgtgtacaccctttgacaagggctgactatcttgcttctcctccggcttgttgttgcctatgctcttgctggcactgtagatattgattctgaggcagcacccattggtacagggaaagatggaaaaaagatctttgtgagggatatttggccttctagtgaagaagtggctaatgttgttcaatcaagtgtgctgcctgatatgtttaaagctacatatgaagcaatcaccaaaggaaatcccatgtggaatcagttatctgtaccctctggtagcctttatgcgtggagcccaacatcaacttacatccatgagccaccctactttaaggacatgaccatgtcacctccaggtccacatggagtgaaggatgcctactgcttgcttaactgtggagatagtatcacaactgatcacatc

SEQ ID NO: 51252 - DNA, 348 bp, Gossypium hirsutum
  Clone ID: LIB3197-035-Q1-M1-A7
tgtagaataccagccctcactccacacatgactaatgggaggatgcttcttcacaaggtgctggatggtgcccagataagtttggaagaatatgaggttatgaaggatctaataataccacttggccgagcacctcacttttctgcacagagtggagcttgagtggtgtgatttgtagtcattgtggaaattctgtttccttatgattagtatctactgagaagttgcaaaatctgatgatcgccgatggaatcatctcaaaggttttgcttggagtgaaggaactatatgtgctaacaaattcggctcattggtgattacggagttgattgttcaaaattaatcgaa

SEQ ID NO: 51253 - DNA, 173 bp, Gossypium hirsutum
  Clone ID: LIB3197-035-Q1-M1-A8
gcttaaccttagacttacgctgctcttatgttcgagaacatagaaattgactgatgctacatttttgacagagtaaccatggatatatatgcggatatggaagagtattgatgagagtactctgattaagagcctcgtgagcaaggacgttatattgataactaatattacaa

SEQ ID NO: 51254 - DNA, 394 bp, Gossypium hirsutum
  unsure (1)..(394): unsure at all n locations; Clone ID: LIB3197-035-Q1-M1-B1
ctcggggaaagatcgattcatcagtcttcttctctgagtagaggttttggatttgtaagcatttacaatgtcttcgtcctatctcccagcaaccactgactcaattgctctggccttagaagccaaaacaccatctgaagccatctcaatcctttaccgtgtactagaaaatcctgcatctgctcccgatgctctacggattaaagagcaggccataacaaatctatctgatcttcttagacaagagaaccgagcagaggagctcagaagccttctgacccaactgaggcccttttttgcactaattccaaaggcaaaaactgctaaaattgtccgtggtataattgatgatgtagctaagataccaagaacatcagatctncagatttctctt

SEQ ID NO: 51255 - DNA, 354 bp, Gossypium hirsutum
  Clone ID: LIB3197-035-Q1-M1-B10
gtctcttcatctcccacttctcaaaaccctaattatatttttttatttcccattttgattcagaaatcgaagcttgccaatggccaacagtaatctccctcgaagaatcatcaaggaaactcagcgtctcctcagtgaacctgctccgggaattagtgcttcaccatcagaggataatatgcgatatttcaatgtgatgatccttggtcccacacagtctccatatgaaggaggggttttcaagttggaactttttttgcctgaagaatatcccatggccgctcccaaggttcgatttcttacaaagatatatcatcctaacattgataagcttgggaagatatgccttgatat

SEQ ID NO: 51256 - DNA, 329 bp, Gossypium hirsutum
  Clone ID: LIB3197-035-Q1-M1-B11
acggtactctcttttctctctctctctctctgtctctcgcgtcggtcgtttcttttcttttcatttctttacgagggtggtcaatatggggtcttcgattttgccagatctcggagctgagatcttgatccccgtttgcgccgttattggaattgccttttctcttgtacaatggcttcttgtttccaaggtgaagctctacccgggtcgagactcgggttcccccggtaacaacggtgcgggtgggaaaaacggctattccgattacctcattgaagaagaagaaggtcttaatgaccataatgttgatattaaatgtgctgcaattc

SEQ ID NO: 51257 - DNA, 408 bp, Gossypium hirsutum
  Clone ID: LIB3197-035-Q1-M1-B12
ctttgacacggtggatttgagattttcattgggtgaggagaaaacaattgttgcttcaaaaataactgtgttcccccgtgttgaaggttcttctgctccattggttttggatggggtagatctgaagctaatttcaatcaaggttgatggcaaggaactgaaggagggagattatcatttagactcacgacatttgacacttccatcaccaccacaaggcaaatttactttggaaattgatactgagatacaacctcagaacaacacttcattggaggggctctacaagtcatctgggaatttctgtacacaatgtgaagctgaaggcttcaggaaaattacattttatcaagaccgtcctgatataatggcaaaatacacatgccgtatcgaagctgataagttact

SEQ ID NO: 51258 - DNA, 388 bp, Gossypium hirsutum
  Clone ID: LIB3197-035-Q1-M1-B2
cccacgcgtccgcggacgcgtgggaaaagactgttgatggtccttccatgaaggactggagaggtggtagagctgcttccttcaatatcattcctagcagcactggagctgccaaggctgtcggcaaagttttgccagcactgaatggcaagctgactggaatggctttccgtttcccactgttgatgtctctgtggttgacctcactgtgagacttgagaagaaggctacatatgatgaaattaaggctgctatcaaggcggaatctgaaggcaacttgaagggaattcttggttatgtagacgaagatttagtctcaactgacttcatcggagacaacaagtcaagcatttttgatgccaaggctggaattgctttgaatgacaac

SEQ ID NO: 51259 - DNA, 436 bp, Gossypium hirsutum
  Clone ID: LIB3197-035-Q1-M1-B3
cggacgcgtgggttgaaacacaaaagaccaaagagatggatagatcaaggttgcggtctctcaccttgctttgcactttggttcttcttggatctctagcttctactcaggcaaagaagtccaaggaagatctgaaagaagttactcacaaagtttactttgatgttgaaattgctggaaaacctgctggtcgaattgtcatgggactcttcgggaaggcggttccaaaaacagcagaaaacttccgagcactatgcacaggtgaaaaaggtgttggaaagagtgggaaacctctccacttcaaaggaagtgctttccaccggattattccaaacttcatgattcaaggtggtgattttacacttggtgatggaagaggtggagaatcaatctatggtgagaaaattgctgatgagaatttcaaagctgaacacac

SEQ ID NO: 51260 - DNA, 417 bp, Gossypium hirsutum
  unsure (1)..(417): unsure at all n locations; Clone ID: LIB3197-035-Q1-M1-B4
aactacttcttcagttcagaggagcggctgtcttggcaccatggttctcaagactgaaccatgccgcttcagcggtggcaagatataccctggtaagggtatcagatttattcgctcagattctcaggtgttcctctttgcaaactccaaatgcaagaggtacttccacaaccgtctcaagccatccaagcttacttggactgcaatgtacagaaagcagcataagaaggatattgcagcagaagcagttaagaagaggcgccgcaccacgaaaaagccctactcaaggtccattgttggtgctacactagaggtgattcagaagagaagaagtgagaaacctgaagtccgagatgcttgcgcggaagctgctctgcgtgaaantaaagagaggattaagaaaactaaggatgaaaa

SEQ ID NO: 51261 - DNA, 266 bp, Gossypium hirsutum
  Clone ID: LIB3197-035-Q1-M1-B5
atttagagtaacgccaaacgtgctagtatcagatgcaagagcagatagcgttcgaactatggagcagatgaaattacaacctgacattgtactaatttaacctaaacaagcaacgctgtcgattcaatcgtgacttacacgattgtgggccaggaagactagtgcaaacagactaactaacctagagatcgctaatttgttgacgcctaagcttgtgcacgaagaggatcatcttctagctgccctcactgatgtaatgcgcacaa

SEQ ID NO: 51262 - DNA, 437 bp, Gossypium hirsutum
  unsure (1)..(437): unsure at all n locations; Clone ID: LIB3197-035-Q1-M1-B6
natcgggtaccctgaaggagaggctttttaatgctgcctacaactctaagaagcaagcaataatgaatggaaagagtccttctcccatatgggacagattggtattcaacaaaataaaagctagacttggaggacgtgttcgttttatggcttccggtgcttcacccttgtctcctgatgtcatggacttcttgaagatatgctttggtggtcatataattgaaggttatggaatgaccgagacatcatgtgtcataagttgcatggatgagggtgatattctttctggccatgttggctctcctaatccagcttgtgaaataaagcttgtggacgtcccagaaatgaactacacatcagatgaccagccttatcctcgtggagaaatctgtgttaggggtccaattgttttccaaggatattacaaagatgaaatg

SEQ ID NO: 51263 - DNA, 289 bp, Gossypium hirsutum
  Clone ID: LIB3197-035-Q1-M1-B7
aacaacgttgccctcaagatgactgtgatattcccaagccccttatgaagaagtcagctgaatcagcaaatggtgaggataataatgttcatgtatccaccagtcggtgagaacatcgaggaccagaaattcatgtggcttcaatcaatgggtactgttatcatcagtatggtttctggatgtgtactgaaattaagatgtatctgcaaacattctgtacatatcaaacaaaccttttcttttgtgtttgtcaaactgtttcttttatatgagatgcaatcttttcatc

SEQ ID NO: 51264 - DNA, 385 bp, Gossypium hirsutum
  unsure (1)..(385): unsure at all n locations; Clone ID: LIB3197-035-Q1-M1-B8
aaagaaaagaaaaatggagaggagcacacccgtgcgaaagccccacacctcaaccgccgacctgctgacgtggacggagggttcacaatctgcctcctccaactcagccgcttcctccgcctccgcccagcgttcctctggtcgttacaaccagccatcggatagaatcagtaaagtgctatttggaggtcaggtaactgatgccgaagctcaatctctcttgaacaagaagccatgctcgggttacaaaatgaaagagatgactggtagtggaatttttgctgctgatggtgccaatggggcatttgaaactactgctatgaattccactaacaaaacangattgcggatgtatcagcaagcaatgaatgggatagccaaatat

SEQ ID NO: 51265 - DNA, 392 bp, Gossypium hirsutum
  Clone ID: LIB3197-035-Q1-M1-B9
cctcttagcaaagacttcagccacccacgcaggccctttaccgatccaaacaatgggacgcgtccgtacgaagactgtgaagaaatcgtctcgtcaggtaatcgagaggtactactctcgcatgacgcttgatttccacaccaacaaaaaggttatcgaagaagtagctattatcccatccaagaggctccggaacaagattgctgggttctcaacccatttgatgaaacggatccagaagggtccggttcgtggcatttctctgaagcttcaggaagaagagcgtgagcgtcgtatggattttgtccccgatgtatcggctattgctggtgaattcaatagaagttgataaggaaaccattgatatgctttcactttttgaatggccgatc

SEQ ID NO: 51266 - DNA, 338 bp, Gossypium hirsutum
  Clone ID: LIB3197-035-Q1-M1-C1
catttttgttcaaggaccacttcttcccttccattttactttgttttagttgccataacgtcaccttccaatacaacccacaatgaggcaacaatatgtcttcactactctcacgttgctcatcctgttttccctcagttgttcaacaacattagcccaatctccggcactggccccggcaccttctggcccgacaaacgtcaccaagatcctcgaaaaagccggtcaattcaccctcttcattcgtcttctaaagtccactcaagtggccaaccagctgctcggtcagctcaacaattccaacaatggtatgaccgtttttgcaccaacggacaatg

SEQ ID NO: 51267 - DNA, 329 bp, Gossypium hirsutum
  Clone ID: LIB3197-035-Q1-M1-C10
tgactggtctccacacagtggctgatgtctactgctgtgattgccgtgaagtgttgggttggaaatacgagcgggcttatgaggaaactcagaagtacaaggaagggaaattcattcttgagaagtcgaaaattgtcaaagagaactggtagggttatccatgaatgttttctggatgattctcctcattaaccaagtgtatggatgatatctttctgtgtttttcttcccaatcgaaaatattttatgcattgttcttccctgtgcattcttgctatgttccttgattggatgttattcgttttgttaataaaatagtgaatgatttg

SEQ ID NO: 51268 - DNA, 435 bp, Gossypium hirsutum
  Clone ID: LIB3197-035-Q1-M1-C11
gttctctcccaactatctcgcccttcactttcacgtccactcctcaaatcaatcgcagccgtccacaacatcttcctccttaccctttctttcatcatggccctgggttgcctcgtttccatcttctcccaggtgcctaacttcaacaccctcgtttgcttccctaggggtacatccccatcgggccctctctttttctgggcatacatcttctacctctccaagattgttgaattcatggacacccttttgatcatcctcagcggatccatgaagaggctatccttccttcacgtctaccatcactccatggtggtcatcatgtgttatatttgcttagacagtgctcagtcctccgtacccatggtgctgatcaccaactgcgtggtgcatgtcgtaatgtactcctattacctgttgtgcaccctggggatg

SEQ ID NO: 51269 - DNA, 417 bp, Gossypium hirsutum
  Clone ID: LIB3197-035-Q1-M1-C12
ctctgctcgaaatcttcttcattctcattctctctccactgaactcttgctaaacggtatcgttttagtcagtctttcatcaatggcgaaagaaccagttcgcgtcctcgttactggagctgcaggacaaatcgggtatgctcttgtacccatgattgctaggggagtcatgttgggtgctgaccagcccgtgatccttcacatgcttgatatcccacctgctgcggaggctttgaatggtgtcaaaatggagttggtggatgctgcatttcctcttctaaagggtgttgttgctacaactgatgctgttgaggcatgcactggagtcaatgttgctgtcatggttggtggtttcccaaggaaagaaggaatggagaggaaagatgttatgtcaaagaatgtgtctatttacaagtc

SEQ ID NO: 51270 - DNA, 411 bp, Gossypium hirsutum
  Clone ID: LIB3197-035-Q1-M1-C2
cacaacgcgaaggccatcgaagaacgaaacaaggagtgggaagcagcaccgaagatattcgagtacaaggatgctggtgtgaactgcgtggcggtggggagctctcccaggttcaaggtatacgatgtggatttcgggtggggaaaaccggaaggggtgaggagcggatccaacaacaggtttgatgggatggtgtatttgtatcaagggaagagtggtggacggagcattgacgtggagatcgccttggaagctggagcactggagaagctggagaaagataaggagtttgtgttggaagtttagatcaataatcaagaccattgttatcatttgtcttgtctttcgtgattttgatcacaacaaatgttatgtttgttaacatttcttacgctatccccaagttggtac

SEQ ID NO: 51271 - DNA, 395 bp, Gossypium hirsutum
  unsure (1)..(395): unsure at all n locations; Clone ID: LIB3197-035-Q1-M1-C3
taacttttagattccctttccattgcactgctctttctttctatagaattagtcactcctgttctagatgaaggttctctccccaattcttgcttgcctagcgcttgctgtggtggtaagccatgctgctctctcacctgagcaatattggagctataagctgccaaatactccaatgccaaaggctgtcaaagaaattctacatccagaactgatggaggagaaaagcacctctgtaaatgtangaggtggtggtgtaaacgtcaatacaggaaaagggaagcctgggggtgacacccatgtgaacgttggaggcaaaggagttggagtgaacacgggaaagccagggggtggcactcatgtgaatgttggagacccttttaattacctatatg

SEQ ID NO: 51272 - DNA, 429 bp, Gossypium hirsutum
  Clone ID: LIB3197-035-Q1-M1-C4
caagttttactcctgttttctggcttacaccattatttgagctttagaagaggctatcttgagaagctttgagttctgatgtctccgctgttgcttggtgtggaggaggaagggcagagtagggtttcttcttcatctgttgaatgtatctcccaaaatggcttggggataagggagtggaattatcttggattatcagatttttgttcagttgacagctccggtgtcctggatgataatgggaataacctgaatttgaaagccacagagctgaggcttggtcttcctggatcccagtcccctgagagagaaactgagctttgctttctaaactcgggaaaacttgatgagaagacactgtttcctctacttccttctaaagatgtaatctgctcatcatcccagaaaagtgttgttactggaaacaaa

SEQ ID NO: 51273 - DNA, 433 bp, Gossypium hirsutum
  unsure (1)..(433): unsure at all n locations; Clone ID: LIB3197-035-Q1-M1-C5
gatgtagtaatatctatagcatacagagatggagaggcaaagaagcaagcaggtttgtttgttgatgtgggttttggttgctgcctttttctcccacaatagggtcattgcagtgacctccactggccttggtgagcagaaaaactactatccagctcctgaccctcatgctggaactcccccttcaggttcacatggcacaccaccatcttcaggaggtggatcacctccctctcatggaaccccgtcacatggaggtggttaccacccttcaccaacaccatcaacgccttcgggtggaaattgtggaactcccccacatgacccttcaactccatcaacaccatcacacactcctcctcatggtactccaccatcatctggaggtggtagtcccccatcgtatggaggangcagtcccccatcgtatgga

SEQ ID NO: 51274 - DNA, 444 bp, Gossypium hirsutum
  Clone ID: LIB3197-035-Q1-M1-C6
ctccaactcacccaaggaaaccgaagcattacgaggagaacacaaaagaacaggagaaacattacgatccctcctaattccaataatgcctgccactaaatgttgcatcgttttcatctgtctcctcttgatgttttcttcttcttgggatgttgcaatgggtggtcggtacatcccatcgagtgttccgagcacaatgaggcctgcatccgtggattacgtgaagatgaaccctcaagtgctactgaatcacaagcacaaggtttcccatgagaaggaagtaaagggttgcatgccaaaagggtttcgccgttcatcagctccaagccgctatgttaactatcaaactcttggttcttcttgcgctacaaaagcgcactgagctgatcagaagcctttatcatgccatatacttttgtctgattgtaagagaactatgtatgt

SEQ ID NO: 51275 - DNA, 328 bp, Gossypium hirsutum
  Clone ID: LIB3197-035-Q1-M1-C7
ccccgttgaaaaaatatgggtttccaaagaaacatattgggtttccttttcttgatattggcttcactaacaagcctctcttctagccttcctagtgaatactccatagtggaacatgagattgacgcatttctttcggaggaaagggtgttggagatcttccaacagtggaaagaaaagaatcagaaagtgtaccggcacgccgaggaggctgagaaaaggtttgaaaatttcaaggggaatttgaagtatatcctagagaggaatgcaatgagaaaagcaaaccaaatgggaacaccatgtgggattgaacaagtttgctgatatg

SEQ ID NO: 51276 - DNA, 365 bp, Gossypium hirsutum
  Clone ID: LIB3197-035-Q1-M1-C8
gaaagtttcaatggcaaccctcaaagttccagttcacgttccttctccttctgaggatgctgagcaacttcggaaagcttttgaaggctggggtacgaacgagcaattgattatcgacatattggctcacaggaatgcagcacagcgcaattcaattcggaaagtttatggtgaagcttatggggaagatcttctcaagtgtttggagaaggaacttacaagtgatttcgagcgggctgtgctgctttttacgttggaccctgcaaagcgagatgctcatctggctaatgaagctacaaagaagttcacatcaagcaattggattctcatggagatagctcgcagtaggtcttcgcatgaactac

SEQ ID NO: 51277 - DNA, 244 bp, Gossypium hirsutum
  Clone ID: LIB3197-035-Q1-M1-C9
acgcgtccgaaagaaataaaaacatgttgatttccattctaagttggtgtgggcgactaaataattcttttcttttcaataattttttttctaacccattttttattttttttaccttactactctttctctttatctttttttatgattttaatctatttaatactattatttcaatttttatataattaattttttttacaatatttttatcagctggatgatagtcattacttcaagatca

SEQ ID NO: 51278 - DNA, 441 bp, Gossypium hirsutum
  unsure (1)..(441): unsure at all n locations; Clone ID: LIB3197-035-Q1-M1-D1
ggcctctcgttggtactgcctcttttttgttctatttgtcctgattggggtctactttgtcacaaatttgatccttgctgttgtatatgatagcttcaaaagcgagaatgttgggttcctaaacaaagagcaatgcattcatctgtttgaagaactgaataagtacaggtctttgccaaaaataacaagggaagaatttgagttaatatttgatgagctggaatgatagtcatgacttcaagatcaacttggatgaatttactgatctttgcaatgccattggtctaagatttcaaaaggaggatgttccatctttgtttgaaagatttcaaatctatcgttcgcctttctctgaaaatttgaaagcctttgttcggngtcccaaatttggatacataatatccttcattctcatattgaatctgtttgcagttatcattg

SEQ ID NO: 51279 - DNA, 58 bp, Gossypium hirsutum
  Clone ID: LIB3197-035-Q1-M1-D10
cgtctctgcggacgcccgtgggattttattattgtttttattgtgtgttttgtttttt

SEQ ID NO: 51280 - DNA, 422 bp, Gossypium hirsutum
  unsure (1)..(422): unsure at all n locations; Clone ID: LIB3197-035-Q1-M1-D11
atttttattgccactgtttacttcatgtccaagccacgatgcatctaccttgtggattatgcatgctacaagcctcctgtgacttgcagggttccttttgctactttcatggagcactccaggttgattttgagcaacaatcctaagagcgtggagttccagatgaggattctggaacggtctgggctgggtgaagagacttgtttgcctcctgctattcattacatccctccaaagccaaccatggaggccgctagaggcgaggctgaggttgttattttctcagctatggattcgttgttcaagaaaacggngctgaaacctaaagacatagatattcttattgtcaactgcagtctcttctcccccacgccatctttgtctgctatggtgatcaacaaatacaagctgaggagtaacat

SEQ ID NO: 51281 - DNA, 419 bp, Gossypium hirsutum
  Clone ID: LIB3197-035-Q1-M1-D12
aaaacctacaacttcagcaaaaacagaagtagaacgactcccattaacaagatagcccattccttggacgatctctttccaccagctccacggcgtaatcagaaacttgcatatctagaaatcccgacttaactgtaaacagtctttaatgatagcaccgatctccaatttatcttcccctttcatttgtagttttttttattttttttattactgatagagcatccccctctacctctatagccattacccccaaatccatccccatttgaagcctttgaacacatgcaatagcctctgcaacaaaaatcgaaggagcacacacattttaataaccctagaccccaaaatcttcccctttgaatcccgtacaacgatcccagagcaagacctatgttcctccttattgtatgcgacat

SEQ ID NO: 51282 - DNA, 357 bp, Gossypium hirsutum
  Clone ID: LIB3197-035-Q1-M1-D2
gttatttgtattaagaatcgccctttagtgatcagtgaggtgaagaaaaatgtcttgctgtggtggaaactgcggttgcggctccggttgcaagtgcggcagcggctgcggcggttgcaagatgtaccctgagatgaactttgctgagcaaaccacaaccgggacacttgttcttggcgtggcaccccggaaaagtgcactttgatggagctgaaatggaaactggggctgaaaatggctgcaaatgtggagataactgcacttgcaacccttgcaattgtaaatgagaaaaaaaagctaagcatattatggaagctgatctaaataatatatgatgtatttgggtttttactatta

SEQ ID NO: 51283 - DNA, 389 bp, Gossypium hirsutum
  Clone ID: LIB3197-035-Q1-M1-D3
cggacgcgtgggctcaaatcatacatttacatcctcctccactccctcgatatgatcctctaaaagaaaaaaacaaaatccaaacctaacccagaacttgcagcaaatcaattatggcgaccatgcccgcatccgcatcagatctgttgaagtccttcaaacttcaaaaccaagcaacaagaactcttgatccgagtctccatcctctgtctcgtctacatcttggcattcatcactcgtctcttctctgtcctccgttatgaatccatgatccatgaatttgacccctacttcaattatcgcaccactctgtacctcacggagaacggcttctacgatttctggaattggtttgactatgaaagctggtaccctttaggcccgatcgt

SEQ ID NO: 51284 - DNA, 441 bp, Gossypium hirsutum
  unsure (1)..(441): unsure at all n locations; Clone ID: LIB3197-035-Q1-M1-D4
caactaaaataatcaaaacccattgtatctttctccttgtttcactctgcagatcctcccccgttcattcattttgttccttttctcattgtcactctccacatcaatacttcccccaaatttttttttctaaaaacaatgtttcgaattcaaccgttggtttcggttttgctttgttgcttcaccttttggttccacatttcatttgggtacttgataacgtgctcggggatagttccgatgaggtaccggaacgataaggtatcgataacggatttcggcggcgtcggtgacggaaagacactcaatacaaaggctttccgggaagctatataccggattcaacatctgagaaggagaggtgggaccttgctttatgtgcctnctggggtgtacttaacggagagctttaatcttactagtcatatgactctttatttg

SEQ ID NO: 51285 - DNA, 426 bp, Gossypium hirsutum
  Clone ID: LIB3197-035-Q1-M1-D5
agagactgcaagtgctgtatacagaaatagaatcagtccagatccaatatttttaacctctgaagctacatcagcgggagggttttatgccatcaacaggcgagggcaggtgttgctggctactgtaaatgaagcaacaatagtgccatttgttagcggtcaattgaacaatttggagcttgctgtcaatctagctaaaagaggaaaccttcctggtgcagagaacctggttgttcaacgttttcaagaattgtttgctcaaacgaagtataaagaagctgctgagcttgctgcagagtctccacaaaggatccttcgtacacctgatacagttgccaagtttcagagtgttcccgtgcaagctgggcaaactccaccgctgttgcagtactttggtacgcttttaactagagggaagctcaatgc

SEQ ID NO: 51286 - DNA, 437 bp, Gossypium hirsutum
  Clone ID: LIB3197-035-Q1-M1-D6
ggtatctctaaagatggtcagactcgtgagcatgctttgcttgcttttaccctcggtgttaggcagatgatttgctgctgcaacaagatggatgcaacaaccccaaagtactcaaaggcaaggtttgatgaaattgtcaaggaagtctcttcttatcttaagaaagttgggtacaaccctgagaagatcccgtttgttccaatctccggttttgagggtgacaacatgattgagagatctacaaacctcgattggtacaagggtcctactctccttgaggctcttgaccagatcaccgagcccaagaggccctcagataagccacttcgtcttccacttcaggatgtctacaagattggtggtattggaactgtccctgttggtcgtgttgaaactggtgtactcaaacccggtatggttgttacttttggtcctac

SEQ ID NO: 51287 - DNA, 228 bp, Gossypium hirsutum
  Clone ID: LIB3197-035-Q1-M1-D7
cggacgcgtgggtgaagctagagtggtcttaagttgatctggaatagcggatctgtattctagaatcttctccgccattttcttcacatctgattccaactcctccaagtcctcttcggagtcaggctccgactcagctcgtcgactgtcgacgccggtctcaagggacatggaatcaaaggcgaccggaaagaacaccttgatggagcttcttctggaaagacgtta

SEQ ID NO: 51288 - DNA, 389 bp, Gossypium hirsutum
  Clone ID: LIB3197-035-Q1-M1-D8
caccattcacgccgtccccccccccccccttttttttcattttgcctgattgttcgagttttagatttcttatataatcaactacctaatcctctcgctctctcaaccacaagctaactagcaaacacacacacattcctaacatctatggggagttcagggcagcaagtctcctggaaattggcggatcacccaacacttccaaaggggaagacccttgctctcatcgttctcgatggctggggcgaggacaaacccgatgagtacaattgcattcatgttgctcaaactcccaccatggattctctcaaacagggtgcccctgaaaagtggagattaatcagagctcatggtaaggctgtagggctccccacagaggatgacatggg

SEQ ID NO: 51289 - DNA, 288 bp, Gossypium hirsutum
  Clone ID: LIB3197-035-Q1-M1-D9
gtataatattattatcatcggcaacatggcatgcgaatcggaagagcagcagctgggccagaaagcccgccaaaaaagaagctgccaagctggagaagatacgccgccgccaggaagccgccgccttggcctcagcggcttcttctctctccgtcgaggaggaggacccctattcctccaactacggtgacgtcactctcccggagcttaaatcttgctccaaaccagatgctggcaattggagcatggcaatttcttccatggactggactcgtgtcggagccctta

SEQ ID NO: 51290 - DNA, 411 bp, Gossypium hirsutum
  Clone ID: LIB3197-035-Q1-M1-E1
aagaaactttggtttttgtttgtgttttaagtttcggatctttgcaaaagaaaggagaaagaagaaatgctagcagttttcgacaaatcggttgccaagagcccagatgctcttaatgctccagataaccctcaggctgtttctgctctcaaaaatggcttcttacctaatcactttgcctctgtttatcccggttctgtctccatcagtctcggctcttctggggttatggcttattctcttgaaaaacagaacccacttctccccagactgtttgcggttgtggatgacatattctgcttgtttcaaggccacattgagaatattgctgttcttaagcaacaatatggcttgaacaaaacagcaaatgaggggatcattgttattgaagcttaccgaaccctcagagac

SEQ ID NO: 51291 - DNA, 416 bp, Gossypium hirsutum
  unsure (1)..(416): unsure at all n locations; Clone ID: LIB3197-035-Q1-M1-E10
tcgcccacgcgtccgattctcaacatttcttctctctccttttctctccgttcccctaaaagacgcaaacgaagaaaattttcacatttaagttcccttttctttttttttttaaatttaattttacctttaaagtttcgatctttgttaatcatcataataatagagaatccaatcttcctatttagccttccattgtaatttagtagatatagccgtatatatttatgggcagatcattcaaatgatttgtttagcagcgtatttcatcccaactttcttttactggcattcacggtgattacttttgatagcaacatgaactccctgtgctttggtgcttgctggtatggaggccagaagatctgtgctagtcattatcgntggatagttaagttgtgtttggctttctcaat

SEQ ID NO: 51292 - DNA, 427 bp, Gossypium hirsutum
  Clone ID: LIB3197-035-Q1-M1-E11
caaaaaagcttccaacattttgaagaaacaaagaatcaaacatgtcgaaggaagtgagtgaagaagggatgagccgaaaggactatgtggatcctccaccggcaccgctcatcgacgtggctgagatcaagctttggtctttttacagagctctcatcgccgaattcatcgctactctccttttcctatacgtcaccatagccaccgtcatcggccacaagaaacaacacgatgcatgcgatggtgttggtcttttgggtattgcttgggcttttggtggcatgattttcattcttgtttactgcaccgccggtatctcaagtggtcacattaacccggcggtgacatttgggttgtttttggctaggaaggtgtcgcttataagggcggtggcttacatggtagctcaatgtttgggtgctatttg

SEQ ID NO: 51293 - DNA, 423 bp, Gossypium hirsutum
  Clone ID: LIB3197-035-Q1-M1-E12
aaaatgtcaaacaaaaattctataggaaaatgaagagttcgagcttcataggatatatatgtttaaggcttctatcttttacttgaataagtcactcatctgtataaattgcaaagggttttagcttatctatgttatttcgaatctttatatttcttgagtaccggtatctgacacttggatatgggatatgaccttcaatcatatccagtttcaagcacatacccgtatctaactcttaagtaacagactgatttgcaatgaatagtgcatttgagttctttttggctatcagaactcaatagataagtaaatatagcttgaattctattgcaactgacattcttatacagtttgttcatgatttgctgaaaatgacatctgttgagggaaatacggctgagcctcggaaaactagtaatc

SEQ ID NO: 51294 - DNA, 392 bp, Gossypium hirsutum
  Clone ID: LIB3197-035-Q1-M1-E2
atggactgattgcttgccatggaaatggatcgagaatctgggaaattggagcaaattgtttcccaatttcgttccaagatcttgcacgttattttggactctagggtcccttctcttcaccaccaccaccagctgcaacagcaagaatcgctttctcattctcgggtgagaaagactgacaaatggttcaatttagtattaggagaccgtcccccagctctggagaatctcaatttctcccttaggaatctcttggatcctatggtaatagacataatactggttcaccgtggttcttgttcctcatcggtggacaatctttatagtccttcagctccagctgtgggacctgctgatgagactgttatcgaaagatgggttgttcaatatga

SEQ ID NO: 51295 - DNA, 131 bp, Gossypium hirsutum
  Clone ID: LIB3197-035-Q1-M1-E3
cggacgcgtgggcaaatttccaaacactagttttcttttactgcattttgctaagacaagccgaagaaacaaagtgaaatattgctgagagtttgtggagatgagtgcctttgagtgagggggtcttaccc

SEQ ID NO: 51296 - DNA, 420 bp, Gossypium hirsutum
  Clone ID: LIB3197-035-Q1-M1-E4
gagaaaatgatgagaccatagccaaaaaaaaaaaaaaagagagagagcaaaagaaagcacagaggaagtgaatcgaaggcttaaacttaagcttaaaagatgctgagatttactcttttatggcttctcgttttctttttatctcttggttcatcttcagctcggcccgcaccttttgctatgcgcataagctgtggggctcgtcaaaatgtccgaacagcaccaacatatgcactttggtataaagattttgggtatacaagtggaattccagctaatgcaacaactccaagtttcattactcctcctctaaaaacactccgatatttccctctatctgaaggtccggaaaattgctatgggattaatagagtaccgaaaggacactatactgtgaggattttctttggataattaaac

SEQ ID NO: 51297 - DNA, 423 bp, Gossypium hirsutum
  Clone ID: LIB3197-035-Q1-M1-E5
gttaatgataagcggaataaacttgcacaacctctaaagtttgcagttgggtttaacagaagagggactgaagagagccaaatgaaaacttcgaaagatgtatcaaagaattctgatatgtctgtattattggaccgcaacaaatgctttggtgccgtggctgctgccgttaaaggcattgtttcagattcagttgtggatctgaaatctcctgagctatctattcttgttgagttgcttcccctttctggagtgcctaatggatcgctattggttggtgtgtcagttttaccccaaaacctggttagtactaagccaagactctgcattaagccactggtttgcgataaaaatgggaagaaggcaagttaaagcaggtaacttatgaagcgagttacgccatgattggtgtggagggctgaa

SEQ ID NO: 51298 - DNA, 441 bp, Gossypium hirsutum
  unsure (1)..(441): unsure at all n locations; Clone ID: LIB3197-035-Q1-M1-E6
cggacgcgtgggctttttcaataatttggctctgtctccatggagagtgataatggtgatggcaagtccaaaatggactatgaagttatagaacagattggaagaggagctttcggagctgcttatcttgttcttcataaacttgagaaaaagaagtatgtgttgaagaagattcgcctggccaaacaaacagagaagttcaaacgtacagctcaccaagagatggaattgattgcaaaactaaataatccgtatattgttgagtacaaagatgcttgggttgataagggaaacagcatttgcattggaaccagctactgtgaaggaggggacatggctgagcttattaagaaggcccgaggtatgcacttccccgaggagaaaatctgcaaatggatgactcaattactcttagccgnggactacctacactcgaaccgc

SEQ ID NO: 51299 - DNA, 307 bp, Gossypium hirsutum
  unsure (1)..(307): unsure at all n locations; Clone ID: LIB3197-035-Q1-M1-E7
aacaaatactatcaantttcaacaaatcattttccaatatcccacattctcttaatgctccacataaccctcanactttttctacttttaaaaattacttcttacctaatcactttacctctttttatcccatttctttttccatcaatcttctctcttcttattttatgactttattctctttaaaaacagaacccacttcttcccatacttttttcctttgtatattacatattctgctttttttcaatccacattgacaatatttcctttttttaaacaacaatatttctttaacaaaacatca

SEQ ID NO: 51300 - DNA, 453 bp, Gossypium hirsutum
  Clone ID: LIB3197-035-Q1-M1-E8
ttttatataaataaataaataaacactgttggttggtaattatatagctgcgaggggtgccaaaaaacaaattataaatattaactaaatgtttgtaataataaattcctttaattgatttcttatccaaatttttattcctttatttttctttatcttcatttgttttactataatttaatattttttagtttttaattttaaacttattttacataatttaatcaattttattaaataaaatacttatttaattttattaataataataatttattaacaatcttttatatttacattcaaatactacattatatattaatattcatattattttttgttacataatttattttactatttttcattcaataaaaataattttttatataaattaatttgtattattataattcatttttatttttatttttatttttggtttatatttat

SEQ ID NO: 51301 - DNA, 376 bp, Gossypium hirsutum
  Clone ID: LIB3197-035-Q1-M1-E9
atgggccctcttgcttctctgatagctcccagcttactctctgcagccatgattgccagacagcagtgtgtccgaggcgggcctcggggcttcagctgtggctcagccatcgtaggcagtggcaagagaggtgccttcagctcagtctccgtgtctggaggtgctggccgatgctcttctgggggctttggcagcaggagcctctacaacctcggggggaacaagagcatctccatgagtgtggctgggtcacgacaaggcgcctgctttggaggtgctggaggcttcggcactggtggctttggcggtggatttgggggctccttcagcggtaaaggtggccctggctttcctgtctgccctgcttggggaattc

SEQ ID NO: 51302 - DNA, 432 bp, Gossypium hirsutum
  unsure (1)..(432): unsure at all n locations; Clone ID: LIB3197-035-Q1-M1-F1
gaaatacaaaatctaagaaacctcaaaaatgggaagctatagattctccttcactttcctcaccatttccaccatcctggccgtccacgtggcgctctcgtcttcttctcccactctcgacgtcgtcggcggcctttttctcccgattaaatcggaatgccgcggatccatcgccgagtgcctgatgctaagcggggaggagtcttcggacttcgatgctgagttcgccatggactccgagatcagcaggcgcattttagccaggactcgatacattagctacggtgcgttgaggaggaacacggtgccatgctcgcgacgtggcgcgtcctactataactgccggccgggagctcangctaatccttactcacgcgggtgcagtagaattacgcgctgtncgcgttagatttattactattttgtaaaata

SEQ ID NO: 51303 - DNA, 439 bp, Gossypium hirsutum
  Clone ID: LIB3197-035-Q1-M1-F2
cccacgcgtccggcgttttccacctccgaagttgagagatttgtatagcagcttctcctctcaaccgccacgccaaacatgccttcacataagactttcagaatcaagaagaagctggccaagaagatgaggcagaacaggcctatcccttattggatccgcatgcgcaccgataacaccattaggtacaatgcgaagcgtaggcactggcgccgtaccaagctagggttctaagctttatgtgccttttttgtagttttgtactcacgcaaagctctgtttttttgtttatttcatgaaattttgatgtggcccttgaacgtttttatatgatggttattgacgatatttagccattgtttcgactgttgtctatctaatgttttgatttcgagctttgaatttttatgaaactgaatcatgatgttctttggaatta

SEQ ID NO: 51304 - DNA, 344 bp, Gossypium hirsutum
  Clone ID: LIB3197-035-Q1-M1-F7
ctcaaatgatatggatttctacttttgtgtttttttcaacttgtattggatcgaagttttttgggattaatttttgtcgtatgcctaggcacaagagggtgttgattctctaataaaatgtaccacacagaatcttggattcagccaagaaaagcctgttgcagcatttacaatatacaaatgccttgttcactggagaacattagaagctgaaaggacaagtgtatttgataatcttattcagatgattggctcttcactagagaaacaagatgacaatgatcacatggcttaattggctgtcgaacacatctgctttgttgtttttgcttcaaagtagtttg

SEQ ID NO: 51305 - DNA, 308 bp, Gossypium hirsutum
  Clone ID: LIB3197-035-Q1-M1-F9
ctctgatacggtcgtggagccttacaatgccactttgtctgttcaccaattggttgaaaatgctgatgagtgtatggttcttgacaatgaggccttgtatgacatctgtttccgcacacttaagctaaccactcccagcttcggtgatttgaaccatttgatatctgcaacaatgtctggagttacatgctgcttgcggttccctggtcagctcaacttccgatctcaagaaacttgccgtgaatctcatcccctttcctcgtcttcactttttcatggtgggttttgcttcacttacttttaaggga

SEQ ID NO: 51306 - DNA, 422 bp, Gossypium hirsutum
  Clone ID: LIB3197-035-Q1-M1-G1
acatacgttattttattcacaaatataaaagctgacttttttggttttttttatcaccaattgggggaaaaatactaataaatttattattatttacaaacaagctcttcttttacatttttattcttacactttatctaaacaattccaattttttttatatttaaccattttatatacattttataataaatttattaaattatatttaattataaataatttaatattataattattattaatctatctttttcttttatatatacttattattttcaatatttatatttttaattaaattcaattatatataatatttatttcaatattcatatttattaaattaaatcttaaaattttaatctcaatatttataataatttacattttattatttaaatcaatatcaaatatttttt

SEQ ID NO: 51307 - DNA, 387 bp, Gossypium hirsutum
  unsure (1)..(387): unsure at all n locations; Clone ID: LIB3197-035-Q1-M1-G2
ccgccatcttcaataatttcttccgttgatctttgttagagattagctttttaatttttcattatgggaaagatcaagatcggaatcaatggatttggaaggatcgggcgtttggttgcgagagttgctctccaaagcgatgatattgagctcgttgctgttaacgatcctttcatcaccactgaatacatgacgtacatgtttaagtacgacagtgttcacggtcaatggaagcatcatgagcttaaggtgaaggactcaaagacccttctctttggtgaaaagcctgtcacagttttcggtatcagaaaccctgaggaaatcccatgggctgaagctggagctgagtatgtngttgagtctactgggtgttttactgacaaggac

SEQ ID NO: 51308 - DNA, 315 bp, Gossypium hirsutum
  Clone ID: LIB3197-035-Q1-M1-G3
ttttctttttcaataatttattcccatcatcgtggggatatattagctgtggaggtggttataaatacacaaaaatcaatatctcaatcaatggattcttaacgatcggacattacattgatacatttgctctccaaaacaatgatattgatctcgttgctgttaactatcctttcatcaccactgaatacataacttacatgtttaattactactatattaactctcaatttaatcattattatcttaaagtgaaggactcaaatacccttcttttttttaaaaagccttgtcacatttttctctatcataaac

SEQ ID NO: 51309 - DNA, 469 bp, Gossypium hirsutum
  Clone ID: LIB3197-035-Q1-M1-G7
tctctttgcaaagcattagcaaccatagccatggcttcctcaccaaaactctggtctatgtctatcctcttcctttttgccctcttctctcatgcaaatccatgctagagagtacttcatcatattcccaatagttaacaccaatgtaaatgatacatcttctttttatgcatttttcttattactcttttttcttagtcctctcttatttaattatctacattgttcacggtcaatggaagcatattctctttttttttatatttataattatatccttattttttttattattatttctaatctttgtctttttaatttatttattttcttcttcataattctttttgtttttttttcttctattactttatttaatttattttaattattttttttacttttcttttttctataccttcttttttactttattttctttttttatttcattttttctatttttctt

SEQ ID NO: 51310 - DNA, 350 bp, Gossypium hirsutum
  Clone ID: LIB3197-035-Q1-M1-G8
ctcagatcctttcctcttagatcatcaaatccattcctttttttcaccaaaacatgagggaaatcataagcattcatataggtcaagctggtattcaagtcggtaactcatgttgggagctttactgccttgaacatgaaatccaacccgatggaatgatgcccagtgacacctctgtaggtgtagcaaatgatgctttcaacactttctttagtgaaactggttcagggaaacatgttcctagagctgtgtttgtggatctggaacctactgtgatcgatgaagttaggactgggacttaccgacaacttttccaccctgaacagcttatttctggcaaagaagatgct

SEQ ID NO: 51311 - DNA, 351 bp, Gossypium hirsutum
  Clone ID: LIB3197-035-Q1-M1-G9
cccacgcgtccggcgaaacaaggcaaagcggagcagccctagaaaatgacggtattccaaaacatagcaatgtctcgtcgagagggtcgtgattccgactctagacgacaccgttctgggttcgaccgtgaacccagccctaagaggtctaggagagatgggaaacctcatactgaaagacaggcatcactcgttgatcgttaaagactggcttcacgaaatacgacagacttggacgacgagcatgatgaccggttcaaggtttttgcgggcgaacttgatactagcggcgcgtcattagaaacttgaccctgtcgggactgacggtgtgactcaattcttcgatttgac

SEQ ID NO: 51312 - DNA, 335 bp, Gossypium hirsutum
  Clone ID: LIB3197-035-Q1-M1-H1
gaaaaagaaaagcaaaaaaatggctcatcgtatagcgttttctgtgtgtgtcgtttcgtattttttattcatcggtttgatatcgtcggaggctttctcggtcgtcggatcagaagttgatccgttgatcaggcaagtaacggacggtcaagatgatggagtggagacacagcctttgaccgctgagcatcacttctcgctgttcaaggctcggttcaagaaatcgtacggctcggaggaggagcatgattaccggttcaaggttttccgggcgaacttgagacgagcggcgcgtcatcagaagcttgacccgtccgcgactcacggtgtgactc

SEQ ID NO: 51313 - DNA, 425 bp, Gossypium hirsutum
  unsure (1)..(425): unsure at all n locations; Clone ID: LIB3197-035-Q1-M1-H2
aaggagtcgaccctccatttggtattgaggcttcgtggtgggatgcagattttcgtcaagacgttgactgggaaaaccataactttggaggtggagagttccgatacgatcgacaatgttaaggcgaagattcaggacaaagaagggattccaccagatcagcaaaggttgattttcgctgggaaacagttggaagatggaaggactttggctgattacaatattcagaaggaatccactctccaccttgtcttgcgtcttcgtggtggtttctaagctctcctatgaaaatgaggtttctggattttatgtgaatgattgtgatgtctggccctgttaaggcctcataaataaacctaaactattttatctatgtnttatctgatgtaatgatattatatgaataaaaaatacatggttacctt

SEQ ID NO: 51314 - DNA, 444 bp, Gossypium hirsutum
  unsure (1)..(444): unsure at all n locations; Clone ID: LIB3197-035-Q1-M1-H3
gccaaacaatcccctcaccactatcactgttaagtctcttcttgctctcaagttcccaatagcccaggacattgaataagtattaagtatgaaggtgcgagcatcagtgaaaaagatgtgtgagttctgtagaaccgttaagcgccgcggacgggtatatgtactatgcacttccaaccctaagcataagcaacgacaagggattttcaatttttgcttctgaatgcacactgccccctgcgacggcagagacaaatgtcaagcatccaatcattcccagttacagcatgcggccaggactagcatcccttattcctaaaatgcaagagccatcttcatcgattattgggtggagggctaacctggcatctctcatattcaaacgcggcaattagggaaaccacanaaagagatacatacaatcgcctacttaatattcaactg

SEQ ID NO: 51315 - DNA, 305 bp, Gossypium hirsutum
  Clone ID: LIB3197-035-Q1-M1-H7
aaggtgtcttaataaacgccttctttcttctgcttcttattcctttattgctttttagaatttttcttaatcgaaaatgagagagtgcatttcgatccacatcggtcaggccggtatccaggtcggaaacgcttgctgggagctttactgtctcgagcatggaatccagcctgatggtcagatgccaagtgacaaaactgtcggaggaggtgatgatgcttttaacacctttttcagtgaaactggtgctgggaaacacgttcctcgtgccgtcttcgtggatcttgaacccactgttattgatg

SEQ ID NO: 51316 - DNA, 339 bp, Gossypium hirsutum
  Clone ID: LIB3197-035-Q1-M1-H9
cccacgcgtccggtttctgtatataggttggacccaaagacctaacagagaaaaaccaaggagtaaattacagggcattaggtgatttgtttgttttagcagaaaaaagaaaggataacttccgctatgatgttgctgttcaaatgattgaaatttataatgagcaagtcagggatctccttgttatctacggaagtaacaaaagatatccttctgttcacttgattttatttcttacaaggttataaaactattgactgatcaaaagttggtcatttggtgtggaacctcttttatatagggttaaatagttgccacttgccggttaattttcgatcg

SEQ ID NO: 51317 - DNA, 169 bp, Gossypium hirsutum
  Clone ID: LIB3197-037-Q1-M1-A10
gttaacacggtaacctttgccgataaaagcggcaatttgatatattccgggagtgatgataacctctgcaaggggtgggataggccttgctttttaacaaaaaataaacccgcaggaatcttggggggacacttggaaggttttacattcctccacagccggggggatg

SEQ ID NO: 51318 - DNA, 310 bp, Gossypium hirsutum
  unsure (1)..(310): unsure at all n locations; Clone ID: LIB3197-037-Q1-M1-A12
aaaaaaaggaagaaagggctccttttttctctgctagggtttcgaaaccctagcttttgcgccgccatcgcctgcccaccgctcttccaccatggacagtggtcggagtttggcaaatcaaggcctttagcccttgtttcagccccacttgaaagctaagtatacttagcccacgattggaagaggaaagctttcccctcgtcccctttcgattttgtttttgaagacggagagaactccgacgacgtaacccgtgaggcgattcangtaacgtcagagtaggtgagcaaaggcgatgggacgggcgtct

SEQ ID NO: 51319 - DNA, 265 bp, Gossypium hirsutum
  unsure (1)..(265): unsure at all n locations; Clone ID: LIB3197-037-Q1-M1-A3
aagaaccggttcctcaatctctctaatcctcactttcttccccatcaaacacaccttcgattttcccaaggttgtagaagatggcagaaggtgaggatattcagccacttgtttgtgacaatggaactggaatggttaacgctggatttgctggggatgatgctccccgagccgtattccctagcatcgttggtcggccacgtcacaccggtgtgatggttggcatgggccanaaagatgcatatgttggtgatgaagctcaatc

SEQ ID NO: 51320 - DNA, 274 bp, Gossypium hirsutum
  Clone ID: LIB3197-037-Q1-M1-A4
ggcgtcttgaacttggagggtcttcacaggcctcttttgtccatacagttgacgaagttgaaagatggtgttgcaatggggtgtgctttcaaccatgctgtcctcgacggaacctccacttggcattttatgagctcttgggctcaaatctgtaacggtacttcgagctccgtcgttgtgccgccgtttcttgatcggaccacagctcgaaacacccgcgtgaagctcgacctcagtccggttgtttcctgcaacggcgacgacgccaccaaac

SEQ ID NO: 51321 - DNA, 125 bp, Gossypium hirsutum
  Clone ID: LIB3197-037-Q1-M1-A5
tctttttatactggggcctttatcaataaaggcggggggtttttctgtggggggggggcgattttgtaccctacccaaggaggaatttttgcacttacttttccaccaaagccccggatttcctc

SEQ ID NO: 51322 - DNA, 390 bp, Gossypium hirsutum
  unsure (1)..(390): unsure at all n locations; Clone ID: LIB3197-037-Q1-M1-A6
gagagatgtccctattctggtggaccaaaaccacatatttttgcacattggggagatgccnaagtgtaattatagttcctggctatccagccttaacaaagacaacaccagtgtggaagttgcacacttccatggcttacaagaagcattggacaaaacttgctgtgggaaaacaccagactacctcaaacatatcgcgacccaaatcgaacagatcgtggaaaggctactaagtttggccataaaaatattgaaattctggtttgtgccgcaatcaaagagatgaaagactggcttacaaataaggattccngctgtaaccagttgaaaaagtgggctgcgacgctcaatatgggtaaggaacaagattttgaagtgaaatttgctgat

SEQ ID NO: 51323 - DNA, 370 bp, Gossypium hirsutum
  Clone ID: LIB3197-037-Q1-M1-A9
cgacgcctgggggtggtcttaagttgcaaccgaaagccaacagcaaaagagagagggcgaagcggctaccgcattaacgctattccctctaaattagaaaagaaatggagactttcaacatcccggcgacgccgtcattgatgaaggagttcctccgccagatgggaggcaccgctgttatcgacggtggactggcgaccgagctggaactccacggtgctgacctaaacgatcccctctggagtgccaaatgcctcctcacttctcctcaccttattcggttccgtacaccttgattaccttgaagctggtgcagatattattatcacagcatcctatcaggccacaattcatgggtttgaagcaaaag

SEQ ID NO: 51324 - DNA, 81 bp, Gossypium hirsutum
  Clone ID: LIB3197-037-Q1-M1-B1
atcagctcccaggaccttccttgggcacgcgggcctcagtttgcccatcagtaaaatggggatgaaatgaacaccgatacc

SEQ ID NO: 51325 - DNA, 180 bp, Gossypium hirsutum
  Clone ID: LIB3197-037-Q1-M1-B11
atcttaatttccttcccattttctcatctgggtcatttcctatatggaattctgggttgtcttctgattagggtataaagttttttttcagatgatcctatattggatttgacagatccccatttttcctttggtaggattctatctgttcataataaaaagataaagatggaatctgat

SEQ ID NO: 51326 - DNA, 421 bp, Gossypium hirsutum
  Clone ID: LIB3197-037-Q1-M1-B12
attcactctttggtctttttatctcaaatgcaatatgcccagtttggaaaaaacggtcatattcataaggcacaatgctggttggagatggatcgtcatccccttcagaaatcaaaactaagattggtggttttgtgttagttttagcaagatggtcgaatgctccgcgagcgatttcgagtaatccgtggtctacgaataggatcttagcttctgaatgtgcgagtaggactgaaaccatggccgagtcgagccgggaattaagcgtacaaagaacagctccggccataggaaccgcgaaatgcagctcgtacattgctggaacattgggagccagagttgaaacctgcttaatacaatttattagagaactcaaaatggaaaatttccaatttgattctttaattcaacatggcacctg

SEQ ID NO: 51327 - DNA, 335 bp, Gossypium hirsutum
  unsure (1)..(335): unsure at all n locations; Clone ID: LIB3197-037-Q1-M1-B2
cccacgcgtacgatttgtattccttgtatatagctatggttcttagctgacttttattttctcctctacaacgaatctaaaccgaaggacccatttgtctaaattataagtgcccttatttaatatatatgatacagcgaacatgaagatatgatgaagaaataaaggacgagtgtagagtggaagaatagagaatcgtttgtgatattgttctttagaagcttctcattgaatatatagatatctcccttntaatccattgcaaaaatcataacgtaccaggttactgaccgacaagttatgcccacctattctgaaatctcactaatgctata

SEQ ID NO: 51328 - DNA, 306 bp, Gossypium hirsutum
  Clone ID: LIB3197-037-Q1-M1-B3
aagcagaagagaaagggactaagatctgaccccatctgtctttccttcgccaaaaaccctgtttcctctcaaaagggtctccttatcctcccttattaatctcccctaaagggtttttcattttctagtggtcgatgggtgtcgaagttgtgggatcagaaatggctaaagtctctgttgacaaagcaactgaagttgagaaatcacttgttcatgataaggaaaatgggaaacttgacaaggatccggttcatagcgagcccattaaattcggctccaatgttgacgaatcaaataagggagaag

SEQ ID NO: 51329 - DNA, 402 bp, Gossypium hirsutum
  Clone ID: LIB3197-037-Q1-M1-B4
cgttgaaaaaatatgggtttccaaagaaacatattgggtttccttttcttgatattggcttcactaacaagcctctcttctagccttcctagtgaatactccatagtggaacatgagattgacgcatttctttcggaggaaagggtgttggagatcttccaacagtggaaagaaaagaatcagaaagtgtcccggcacgccgaggaggctgagaaaaggtttgaaaatttcaaggggaatttgaagtatatcctagagaggaatgcaatgagaaaagcaaacaaatgggaacaccatgtgggattgaacaagtttgctgatatgagcaatgaggaatcaagaaaagcttactggtcaaggtgaaaaagcccatcaacaaatggataaccctgtcaaggaaca

SEQ ID NO: 51330 - DNA, 126 bp, Gossypium hirsutum
  Clone ID: LIB3197-037-Q1-M1-B5
atcttaatttccttcccattttctcatctgggtcatttcctatatggaattctgggttgtcttctcattatggtataaaatcctttttcagacgatcccatatttgatttgacaaatgcccatttt

SEQ ID NO: 51331 - DNA, 364 bp, Gossypium hirsutum
  Clone ID: LIB3197-037-Q1-M1-B7
gggtaatgtagcttttatatctggctatcttggttgttgttaactggagaacctggatagtgcgctgcataccactactcaattcgaggcagtaacaagcaagatggaaaatagttcaaagcaatggcgtttcgaagggaacaaaaggccgaactcggcatcagcaatcagtgtgcgaggagttcttgatctggtaattggaaatctcagcaccgatgatctgagacccaccattcccctaggcaacggcgatccctctcaatttgcatgctttaggacttccacaacagcggaagaagccatatttgatgccgtccattcacccaagtacaatggttatgcacctactgttggagttctctct

SEQ ID NO: 51332 - DNA, 422 bp, Gossypium hirsutum
  unsure (1)..(422): unsure at all n locations; Clone ID: LIB3197-037-Q1-M1-B8
caggatttgcttactcatcttctaaggagccttgcaagccgtactggtgaacaaggggggaaaaacatgtctgggcttttgccagaagcttgtgatttagaagctgtttcagctttattttcgaatggccaaggccctcctcggcctttcaagcaccacataactggaactgcatcagagattccacatacaggaagaaaatcttgtgatactaaaggtgctgaagtgccaagcaatacagctggagccagcaagataaataattttgatttgaatgacatatacattgactcagatgatgagacagatggcataaagaggtcacccgcacctgtgaatgcanggactggctcccttgattgcccttcatgggtccagcaagattctcatcaatcaagtccaccccagaccagtcggaattc

SEQ ID NO: 51333 - DNA, 408 bp, Gossypium hirsutum
  Clone ID: LIB3197-037-Q1-M1-B9
cccacgcgtccgggatcttctcagtcaggatatgcaccaccaggtcctcaatctgcgtatgcccctcagcagcagtatggcaagccatattcatatgtgcagtcacaaggaccccaaacatatggtcctccagccaatcaacctggagaagttccatatcaaggtccaactggccaatcttacagtccaaatgtgcctcctcagcagcaatacgcatatgcaagtggccccttgcaacaaagctatcctccatatggctctgcaccacccggtgatgggtataatcagcctccaccagtgactggcccagcgtattcccaacaaggtggacagtctgttcctggttacagtcaaccttctgctcagcaagctactccttatgcacaagcgaatactgctgctgggtat

SEQ ID NO: 51334 - DNA, 157 bp, Gossypium hirsutum
  Clone ID: LIB3197-037-Q1-M1-C1
aatttccccatctctctcgtctctgggtctcgtaagggggtgaatagtgttggaattagggccaatggctcggattgggacctctgcagctcacattgggttggcaatatttgctggggccatgtttggtgggttccggaccattgcacaagatatt

SEQ ID NO: 51335 - DNA, 420 bp, Gossypium hirsutum
  Clone ID: LIB3197-037-Q1-M1-C10
cggacgcgtgggctttttttttttttttgaaggcccaaaacaataggggggggtataaagaaatgaaggtcaatgaaaatagcatcattaagaacaaatgaacaatttcttgaaaccctctacaagtgggaaatccatccacatatacagcaatatatctactttcaaaactatccacgtagggagacaaaaggataaaaactacatacacgttgctactcacccaaatatgcatgaggagcgtgcaatacaagaagcttatcccatgtttggaaaaattccagaaaagtttgggatcttgtcaacatgcttcagggcgcgctctgcaatctgtcgggttctgtagtcggcatggtggaaggcatcaacaaatgcagtgctcacattttgatctccagaaacttcataagctatatcatc

SEQ ID NO: 51336 - DNA, 292 bp, Gossypium hirsutum
  unsure (1)..(292): unsure at all n locations; Clone ID: LIB3197-037-Q1-M1-C11
aagccatgcaagtatatatatatatattgatatatggtttataaacaggtgaaagcctagttgttgattatgatgaatgtaaggaacttaggtttcagcactggactcctttttaactgttttattgcaggaaaggtttatttttgtattatatatgtttcttaaaactctacatatagttttcaaaaaaaaaaaaaaaaaaaaaaaaaaaaaaaaaaaaaaaaaaaaaaaaaaaaaaaagnggaaaaaaaaaaaaaaaaaaaaaaaannaaaaaaaaaaaaaagagaaaag

SEQ ID NO: 51337 - DNA, 444 bp, Gossypium hirsutum
  Clone ID: LIB3197-037-Q1-M1-C2
ctcaaactcaaaacacactaaaagtctccggcatcaatccgatcaacgcttgccctttccgtcttttgtttcttccttctagttttcttctccactctcctcgccgtcttctccttctcttttttgcccctctttggcgtcacaactggacttagaacaccgatcagaaaccaccctccatctcacgttttccgttcctctccgccggcgaaactggtgaagtttttactgttgtgtccatgggaaccggtaaagaagatacagtcattttcctggatcgtgcttctcgatcaaccagagggagaaggatgacgaagttgctggacgaggaatttgaagaggacgagttgttttggaatcaagaagcttttaaagaggaggagaatgatgtcaattacgaagaagagccggaggttgctgatggtttgatagtgacttcgatga

SEQ ID NO: 51338 - DNA, 259 bp, Gossypium hirsutum
  unsure (1)..(259): unsure at all n locations; Clone ID: LIB3197-037-Q1-M1-C3
gcgagcgaaccgggaaaagcccacctttagaatcggggggcatctgcgtccggggtgtaggctgtanaaacgtcctcagcgacggaccgggcccaattcccctggataggggcgcccgatatggtgagagccccgtcntgcccggaccctgtctcaccaagaggcgctgtctaccaatcgggttgtttgggaatgcatccctaatcgggcggtaaattccgtccaaggcttaatacgggcgagagaccgattgcgaaca

SEQ ID NO: 51339 - DNA, 373 bp, Gossypium hirsutum
  unsure (1)..(373): unsure at all n locations; Clone ID: LIB3197-037-Q1-M1-C4
cgctctctagggttttcgtggtcaantaaaaaaaatgaaggtggtagctgcctacttgcttgccgtcttgggagggaacctttccccttctgccgatgatttgaaggatattctcggatctgttggagctgangctgatgatgataggatagagttgctattgtccgaagtcaaaggcaaagatatcaccgagctaattgcatctggaagggagaagttggcttcagtcccttcaagtgggggtgctgttgctgctgctcctaccgcatgtggcggtggtgccagtgctgcaccagctgctgaggccaagaaagaggagaaggtcgaagagaaaggagagtccgatgatgatatgggtttcagcctcttcgat

SEQ ID NO: 51340 - DNA, 456 bp, Gossypium hirsutum
  unsure (1)..(456): unsure at all n locations; Clone ID: LIB3197-037-Q1-M1-C5
agaaagatgaccaaaatgggttttattgttttggcgttgatggtggtttccgccgcgacggtggttacggcggctgacaatagtgggttatcgaatgagtgcagcaaagatttccagagcgtgatgacttgcttaagctttgctcaaggaaaagcagcgtcgccgtcgaaagagtgctgtaattcagtggcggggattaaagagaataaacccaaatgtttgtgttatattttgcaacatacacaaacctctggtgctcaaaatctcaaaagcttaggtgttcaagaagataagctgtttcagttaccatcggcttgtcaattggaagaacgctagcgtcagtgattgcccaaagcttcttgagttatctccgagctcaccagacgccgncatcttcaccaactcctcctctaaagcaacgacacccagtacttcagcaaccaccgcaacgccgtc

SEQ ID NO: 51341 - DNA, 433 bp, Gossypium hirsutum
  Clone ID: LIB3197-037-Q1-M1-C7
gtgtttcttcagaaggaagaaaatcccatccggtatttgctctttatggtcgcatcttacttcttaaggagaaaaacaaacacgatcattgtcggctacactcccaaacactcaactctccttcctctcataaacaatttttgcccaattcttcaagaaaaagaaaccctagctaaacatggctgttcccaaactagaaatgagacctctcggaaacacgggcctcaagctcagcagcgtgggcttcggagcttctcctctcggcagcgtcttcggttccgtttccgaaagcgacgctgtcgcctccgtcctcgaagccttccgcctcggaatcaacttcttcgacacctctccgtattatggagcgacattgtcagagaagatgctgggtaagggacttaaagctcttggagttcctagaagtgaatatata

SEQ ID NO: 51342 - DNA, 284 bp, Gossypium hirsutum
  unsure (1)..(284): unsure at all n locations; Clone ID: LIB3197-037-Q1-M1-C8
cttggcctgttgattttaggttcatgggttctgcgacttgcgatccgagtggatatgctnatggaaatttggggaacaatggtgtaaccaacttgagttcccctgaaaggaatggtgattcaaggggcaaggttcgtgaaaaaagtgaaaatggtgttgctgacactgaacaaggcaatgaagattcaccatataatttggatggttttgttggttgaaaataggcactctgtgggtgatgaggacttggactctgcatcagcaccattgccttcagtataaaa

SEQ ID NO: 51343 - DNA, 450 bp, Gossypium hirsutum
  unsure (1)..(450): unsure at all n locations; Clone ID: LIB3197-037-Q1-M1-C9
aactcttctcaccttgttctcctcgctttcaagctgtctctctattgaagcagtgcaatgggtacgaaaagcaagactcagttcttcgcttttctgctactggtatccactgctcattccttctatctccctggtgttgcacctcgtgatttacaaaggggtgatcctctttatgtaaaagtgaataaattatcctctacgaagacacaacttccatatgactattactacttgaaatattgtaagccatccaagattgtgaacaatgctgagaatttgggggaggtactacgaggtgaccgcatcgagaactccgtctacacctttgaaatgagggaggatcagccttgcanagtagtctgtcgaataaaactcgatgctgattctgccaagaatttcaaggaaaaaaatgatgatgaatactcgagtaatatgatacttgataaccct

SEQ ID NO: 51344 - DNA, 337 bp, Gossypium hirsutum
  unsure (1)..(337): unsure at all n locations; Clone ID: LIB3197-037-Q1-M1-D1
gtttcgccgtcgttgcctaccatcaatttgctaagaaaatagattgacgatgggattaccaaatgcgagcgatgacttgtcaactgaagttgaggagaatcctttaaaacccctttttccctttggtttttttaaaaaccatctttaaaagtctttccgtcctgatgctcgtccgtttggaaaaccaaaaaaaaccacctttggccttggggctgtggattttgctaatggttcncaacttgcaaaaattggttcaactgcaagtttgtcgctttttctaaatacatatactgctttgatttggcaagcaattaaccttgagtttaataattaattc

SEQ ID NO: 51345 - DNA, 176 bp, Gossypium hirsutum
  Clone ID: LIB3197-037-Q1-M1-D2
taaatcaggggaaatttgctcagtttatagcagatatgaatatagggattggggctcattttgacaacctttctatgtgatctgttaactgtcaaaaccttgaatgtaaagaatctattgcaaaacttagttatgggaggaaatgttcgattaaactctgtttctacaattacatc

SEQ ID NO: 51346 - DNA, 408 bp, Gossypium hirsutum
  unsure (1)..(408): unsure at all n locations; Clone ID: LIB3197-037-Q1-M1-D3
aaaaaaggctgaacatttcttcaacaactctactctggctggcggctttcagtagtcgacacggtgactttcttcaccaactctcttccgtgagagtctgtcaccttcccaaataccgccaccgctttaggcggcttccgccgctccatcacttaccgaagccgcccttcaccaagtgccataaacaaaagagagaggtcattaagcanatagagtgagaaatggggtgtgggaatgtgttcttcacgttgatcataacattatcagtagctctaatcacctacaacatcctcatctcagccaatgcttctttaaagcaagagcttcctgggccttcaacctcatccatcatcgaccccataatccggatgccggtagaaagatccaaaaagtatgggtcaaatgcac

SEQ ID NO: 51347 - DNA, 349 bp, Gossypium hirsutum
  Clone ID: LIB3197-037-Q1-M1-D8
gggatgactggtccaatcgatgttgtggcaacgaatggagtccctcacaggtgtatggctgcacgggaaccacttcactggaacaatcccagagagaattggtaagttaactctcttgaaggatctcaatcttaatagtaacaaacttgttggcctaattcctattagtttagcaaatatgagactgcaaaacttagatttaaacaataatcacttgatgggtccaattccaatgttcaaagcatcaaaggtaacttttgcttcaaacaagttctgtcaagccactcaggggcttctttgctccccagaagttatggcacttatagagtttcttggagtgggaattacc

SEQ ID NO: 51348 - DNA, 395 bp, Gossypium hirsutum
  Clone ID: LIB3197-037-Q1-M1-D9
ttttaaactttaaatctaaataaataataaacgaaaacaaaggggccggagcaatgaaagaaaattttcaaaagaaagaaaaaaaaaagttcttggctatttagttttgggttgttacttgattactagttttgtttttaaaggtacaatctttaattaaagaagggctttgtttgaaaagaaacagagatgggtggtgttgttgctgtcgatggcttgttgtctctttgctttttttctctttggaaaaacaaaagatcttggatagtggtgaaacactatgaggagcaacataaggattaaaaagccgagacgaggcggagtttggcgggatttggggcagaaaatgaagtgtttatgcgccggagagaaattaatcaaagtggaacagatga

SEQ ID NO: 51349 - DNA, 269 bp, Gossypium hirsutum
  Clone ID: LIB3197-037-Q1-M1-E1
acccttccggccatttaaaaattttattatccaaagtgccaggggtggaccttattaccagggtggccacttctacttgcaagaacattccgatctcatcaatgatattcctaacctgcctgcacctcgagtggatcacacccctgtcggtgacattattaaaaaagcctgtcatcttcgtcttgtgaaacccttcattggtggtggtcaaaacaaccacctgttaaccagtaattagggctttgattagaattattgggggggaaaaa

SEQ ID NO: 51350 - DNA, 174 bp, Gossypium hirsutum
  Clone ID: LIB3197-037-Q1-M1-E2
cgcttcttctactatttccaaattcccaatgccgtggcacaagacgtagcttggaagttcttagatcttcgcttcaatttgagttgctccctggaaatatgtcaaaaaatctccatcttattcatttttacaatatcatgctgcctttgaagttaattcataatggttgatagc

SEQ ID NO: 51351 - DNA, 447 bp, Gossypium hirsutum
  Clone ID: LIB3197-037-Q1-M1-E3
gaaagaagagaaaatgagttagaaaaagaaacagaagaaaaagacgaggaaaggctagtgaggaatgtttccactaaccaagatatgaatttttcttgtgttgctacttttaaggttcctgaaagatcgaaagataactttcaacttcaatacctctcaaatgaaagacgctttcatacgatcaacttaggcaaagatgaaatcacactacatgatcccgaaggtaagcgaggtaaggaaattttagaaaccgagtccagtgcagatttgaaaattattgataaaacttttggtgacttagttcttaaaagatcccctcattttgatccgattaattgttactcttcgattgtggttgataaagtcattacgaaacagagcgtgatttgttattctcttaatttaccttgtgtaaaatcctcgaatttgtccaaatctgttttggag

SEQ ID NO: 51352 - DNA, 526 bp, Gossypium hirsutum
  unsure (1)..(526): unsure at all n locations; Clone ID: LIB3197-037-Q1-M1-E7
gcgcgtcnnttcttcnntttcgtccttataacatgttgtcgctttgaggnngtttttatgtcatggtgtttagtgtcgtcnntctgaatgccttttatgcatatgtgcgtnnttttctttcttcttcttcatgtatccatccgtccgtcctgcctttccgcctcttctcattcgatggcatgccttccgattcgagtctgaccctattctctctcatccctctgatcagcctcaagggtttccaagccttggttttaggtggaaatttcaacctccttttttggtgccctctgtttcaactatgatcttcttcattacagaaatgcaactcaaggagtatccaacccatcaaagctacagctactgaaattcctcctacaattccaaagtcacggagcagtggcaagaccaagattggaatcaatggttttggtcggattggaagggtggttttacgaatagcaacttcaagggatgatattgatgtagtagctgtcaatgatccctttattgatgccaagtacat

SEQ ID NO: 51353 - DNA, 355 bp, Gossypium hirsutum
  Clone ID: LIB3197-037-Q1-M1-E8
gaaagatgatcaaaatgggttttattggtttggccttgatggtgggttgcggcgcgacggtggttactgcggctgacgagagtgggttagcgaatgagtgcagcaaagatttccagagcgtgatgacttgcttaagctttgctcaaggaaaagcagcgtcgccgtcgaaagagtgctgtaattcagtggcggggattaaagagaataaacccaaatgtttgtgttatattttgcaacaaacacaaacctctggtgctcaaaatctcaaaagcttaagtgttcaagaagataagctgtttcagttaccatcggcttgtcaattgaagaacgctagcgtcagtgattgcccaaagct

SEQ ID NO: 51354 - DNA, 261 bp, Gossypium hirsutum
  Clone ID: LIB3197-037-Q1-M1-E9
atggcgcagcgaacgagcagtgaccgcgctcttacctagctctgctccacgagcgcccacctgtctgcggccctgggccccacgcccggctttgcctaacagccacgatgatgttctcgggcttcaacgcagactacgaggcgtcatcctcgcgctgcagcagcgcgtccccggccggggatagcctctcctactaccactcacccgccgattccttctccagcatgggctcgcctgtcaacgcgcaggacttctgcacgg

SEQ ID NO: 51355 - DNA, 428 bp, Gossypium hirsutum
  Clone ID: LIB3197-037-Q1-M1-F1
ctgaaaatgagtatcctgtggaaaacctcagtgattcagaagtcatgtcaccaacttctagacattcatgggattacatcaataggtttgctagcccttattcttccacacccttcagtcgcgtatcatgttctcctgagtcctcggtttgtagggaagcaaagaagcggctctcagagagatgggccatgatgacttcaaatggtagttctcaagaacaaagacatggcaggagaagctcaagcacattgggtgagatgcttgctctttcagatacaaagaaattggtgagatctgaagaagagggaagtagtaaggaacaagaatgtaggggatcaacttcctgtgtagctagtaatttgtatgaagaagaaagtacaagtgattctcccaaaaatattctgaggtcaaaatctgtgcctgggtct

SEQ ID NO: 51356 - DNA, 354 bp, Gossypium hirsutum
  Clone ID: LIB3197-037-Q1-M1-F2
aaacagataaacgaggaaccggcagacaaacccgaggttgaacaaaatgcctatgaggttaccaaggctgtcatcttgtctgaagaggtggaagactacagttccgtctcaaaagaatgtctgaaggaaggagaatcaaaggaacaggtagaggcgaaaaacttggagtttgaagatcattcaatcaaggaccaagaagcatccgtcatcgtagaatcggaagataggagacaggatcaagagtctggagacccttgaagtacaggcaccaaagatgcagaatcagaagaaaaaatttagggacattgttgatgaatccaagcatgattgtcaaggacaagagtcacgaaattt

SEQ ID NO: 51357 - DNA, 402 bp, Gossypium hirsutum
  Clone ID: LIB3197-037-Q1-M1-F3
cacatgcaccgtcacctccgtcgtccaccgccggtacgtgtttcgattcgtagtgtggtgaatgtaaatcggtacgtgcttggatttgtgaataattgagttagggttttgatttatctgatttatttaaaagaagaaaaaaaaatatggagaagtacgagctggtgaaagacatacgatctgggaactttggtgtagcgaggctgatgcgtaacaaggaaaccaaagaacttgtcgccatgaattatatcgaccgtggccataagattgatgagaatgtggcaagagaagattataaatcatagatcgcttcgtcatccaaatataattcggttcaaagaggttgttttgactcctacacatcttgcaattgtggatgagtatgcttctggtggtgagctc

SEQ ID NO: 51358 - DNA, 300 bp, Gossypium hirsutum
  Clone ID: LIB3197-037-Q1-M1-F7
tggagatgagactaaagtggaggaaacacggggtacatctgcgtttgtgggtactcctgagctcgtgtcccggaagcccacattccccgagaatagtagagcattgatggatatcctagtgacgctcatatacaaaagtggagatgagaggaccaaagcccgtgcaatgctttgtgatatttaccatcatgccctttttgatgagttttcaattgctcgtgatttgctactgatgagtcatttacaggataatattcagcatatggatgtttcaacacagatactttttaaccgggcaat

SEQ ID NO: 51359 - DNA, 312 bp, Gossypium hirsutum
  Clone ID: LIB3197-037-Q1-M1-F8
atgcatgagaaaggatagcaagtctctgaggtgacctcagggtggaattctctgttaagtccaccctgccccagggtgctcctaccctcttggtctttttagccaaggtgtgatttaagcacctgactgtcccgtttaccttaacaactttgggaatccatgtgatgattttgatacttcttcctcatttgggacattcagcaggagcatttgggcttctggggcccctgagaccaaagaagatgggccaagtgccctgggaaatcagctgaaggtcaacaagaaaactggttgtgagttgcacctgtcctg

SEQ ID NO: 51360 - DNA, 318 bp, Gossypium hirsutum
  Clone ID: LIB3197-037-Q1-M1-F9
cttgtacattaattacgcatttttatgtagatggaattttttataactaatattaattgtacttttaaagaattctttagatttttataataatgggagggggaacgcatcgtccgacgatggatctgctgcgatcggagccaatgcagttggtgcaacttaatcccgattgagtcagctcatcgttccatttcttatctcggtgatctcggcttctttcaattcaaagaccttaattcagagaagagccctttccagagaacgtatgctacacagatcaagagatgcggggaaatggcacgcaagctacgtttcttc

SEQ ID NO: 51361 - DNA, 193 bp, Gossypium hirsutum
  Clone ID: LIB3197-037-Q1-M1-G1
ccattacattttctgcttttttttaacttcccctggtgggattttttcgaattaggtggagttggccggccaaggaaaaaaccttgggggcagccttggacctgttccaaaaattgccgcctcgtacttaaaaaacaggcctttccgtttttttaacccttttgcctaaaaattcctccaatctcctttttaa

SEQ ID NO: 51362 - DNA, 399 bp, Gossypium hirsutum
  Clone ID: LIB3197-037-Q1-M1-G3
gccaattgtttgagctagctagctcttactcaaatggcgaccaaaacgatgatggtgcagatattttcacttttcttctttttgttcagtatctgcaactccattttccttggtgctaatggagatgacaatggtggttggcaaactgcccatgccaccttctacggtggtgctgatgctaccggcacaatggggggagcttgtggctatggaaacctgtacagtcaacggtatggaacgagcacagcagctttgagcactgcactcttcaacaatggcttgagctgcggtgcctgctacgagctccggtgcaacaatgatcctcaatggtgcattattcgaaccataaccgtgacagccaccaactttttgtccccctaactatgctttatctaatga

SEQ ID NO: 51363 - DNA, 373 bp, Gossypium hirsutum
  Clone ID: LIB3197-037-Q1-M1-G7
ggagcagtaaaaatatcccctcaccaccgctactattattataccattactctacgtacagctgctatcattactacatacatgtccacccaaagtcgagcagttggcggcaccgagcacaactggtgccgagcggtggtcgggggaaccgggatagccgtcttggctatcatttcttccaaaaaccccgacgtttcacatcttaaaaatgccctccacaagctccaaatctcccatcccattcttaggtctcgcctccattacagtcctactgccaacagttactccttcgttacctccccctcccctttcattcaaatcaagtactttaaccattctacaacttgtcaaatccttgaaaacaaccaaaaca

SEQ ID NO: 51364 - DNA, 366 bp, Gossypium hirsutum
  Clone ID: LIB3197-037-Q1-M1-G8
caaagaaataaaaaacaaacaaaggtagcctgagcaaactatgaggaagtgggcgatcccttccgctttggttcttctttgccttctcagtctcctctcagatcatgggagaaaagtacaagcaaatgacgaggaaggagctgtagatcctcctaaagtcgaggaaaagatcggcgctgtgccacatggcttacaaacggattctgatgtagttaaaagggaatcggaatccatctcttcgagatcgcttcgcaataatgcggagaaagttgagttccaagctgaagtgtctcggcttatggatatcattatcaattctctttatagcaacaaagatattttcctcaaggaagtgatctccaatgc

SEQ ID NO: 51365 - DNA, 353 bp, Gossypium hirsutum
  Clone ID: LIB3197-037-Q1-M1-G9
tgctgttgaagtagtaatatctatagcatacagagatggagaggcaaagaagcaagcaggtttgtttgttgatgtgggttttggttgctgcctttttctcccacaatagggtcattgcagtgacctgcactggccttggtgagcagaaaaactactatccagctcctgaccctcatgctggaactcccccttcaagttcacatggcacaccaccatcttcaggaggtggatcacctccctctcatggaaccccgtcacatggaggtggttaccacccttcaccaacaccatcaacgccttctggtggaaattgtggaactcccccacatgaccctttaactccatcaacacca

SEQ ID NO: 51366 - DNA, 428 bp, Gossypium hirsutum
  Clone ID: LIB3197-037-Q1-M1-H2
ctcactctctcttctctgccgatttctccgttcttcaaaatttaagttttttctgctaaaaagttgctatgggtaaggagaaggttcacatcaacattgttgtcattggccatgtcgactctggaaagtcaacaacaactggtcacttgatctacaagcttggaggtattgacaagcgtgtgatcgagaggttcgagaaggaagctgctgagatgaacaaaaggtcattcaagtatgcctgggtgctcgataagttgaaggctgagcgtgagcgtggtatcaccattgatattgccttgtggaagtttgagacaaccaagtactactgcactgtcattgatgctcctggacatcgtgacttcattaagaatatgattacgggtacttctcaagctgactgtgctgtccttatcattgactccacaact

SEQ ID NO: 51367 - DNA, 106 bp, Gossypium hirsutum
  Clone ID: LIB3197-037-Q1-M1-H7
tcttacgcgtgggtggacctggaagaacagtaccgagctcctagcagacgtgagggcgatccctatagtgagtcatattaaagcaaggcgtaatcattgtcatagc

SEQ ID NO: 51368 - DNA, 426 bp, Gossypium hirsutum
  Clone ID: LIB3197-037-Q1-M1-H8
cttccatttcatttagcagcaccttaggatggcatagcaacagagacgaaaaatataaaagagaaaaataagataaagaaaagtaaaaatagcaaagaacaagaaaaggaaaagaaaaaaaaataagaaaagaatgaaaaaaacaaaataacaacataaaaaaggagaaaaaaaaaaagagagaaatgaaataacgattaaggaaaaaagaagaaaaacgaggaaaaagaaaagtaggcaaaaaagtaaggaaagaaaataaacagataaaaaaaaaaagcaaaaaaagaaaaaaaagaaccaaaacggcaaaaaattaaaaaaaaaaaaaaaaaagaaatgaagttaaaaggaaattaaaaggaggacaaaaagacaaaaaagttaaggaaaaaagaaaaaaaattaaaagaaaaaaaattggaa

SEQ ID NO: 51369 - DNA, 352 bp, Gossypium hirsutum
  Clone ID: LIB3197-038-Q1-M1-H10
cggacgcgtgggcggacgcgtgggcgataaaatacttttacatccagcccaatccctgaccaaagtcagtgacgcctgaggtaggcctttttctctcaattccgttgttgttatttgcccccagtcctttctcctctcgtcactcggagaactgctttgttttcactaataaggtttgtttctatttacgcttttcattccgttgtactgatatataggttgattgcgcatagaatctgtttgataaaatgcttaagggaaaagtttctccctttttcccaaaccgttttctttttaaccgatccggcagttttttggttggtgacgtggggcttcccataaaatgaaaaat

SEQ ID NO: 51370 - DNA, 420 bp, Gossypium hirsutum
  Clone ID: LIB3197-038-Q1-M1-H11
cctaatcaaaaaatggggaaattgtggctaatttgcattgcttcgatctcaatccttctcccatttctctgcaatgctttctctcccgaatcgccaacggatcgccgagtccttgttctcctcgacgacttcgccatcaagtcgtcacactccctctacttcaatgccctcaaatcacgtggcttcgacctggaattcaaactcgccgatgatccaaagatcgccttgcaacgctacggccagtatctttacgatgccttgatcctcttctgcccctccgtcgaacgatttggaggatctattgatgttgccgccattgtcaattttgttgattccggtcatgatttaattgttgcggcggatgttaatgcttcggatttgattcgggaagttggtactgaatgtggagttgattttgat

SEQ ID NO: 51371 - DNA, 355 bp, Gossypium hirsutum
  Clone ID: LIB3197-038-Q1-M1-H12
gttcaatatttcctggtaaacaggaaggcattgcagtaggaaggacttttgctgctcttaagaattataaagtggatggtaacaaggaaatgatggctattgggctgatgaacatggttggctcctccacttcttgctacattacaactggcgccttctctcgatcagcggttaatcacaatgcaggagcgaaaagtgcagtgtctaacatagtaatgtcgattacggttatggtgacccttctctttctcatgcctttattccagtacaccccaaacgtggtgttgggagctatcattgtgtcagctgtagttggccttatagacattccagcagcctgtcaaatttggaagat

SEQ ID NO: 51372 - DNA, 415 bp, Gossypium hirsutum
  Clone ID: LIB3197-038-Q1-M1-H5
aagcagtttgggcattattgctatcttaaaatgtagtttcctgatttgttttgggagtttagtggttgttgaagctttagatcgtcaatcttagttgcagagctaatgaacacacaaatttctcattaataacctgtcataactcatggaagtctattttgtctaacatttttggttgttcttattagcggttcaccaatattgtttaaagttcttgtcatttgttaattatatagtaatcaacttcggtgtggtgtttgaacttagacctcattcatcttcttgttccatgttaatggagacttatctacataattggcgaggactatattctggaaaattttcaccactgttgataactaaaaattgttcatgtacctctagatatgactaagagaaagcttttggaattgag

SEQ ID NO: 51373 - DNA, 390 bp, Gossypium hirsutum
  Clone ID: LIB3197-038-Q1-M1-H6
cggacgcgtgggctgagtagtttctttgcttcactgatttgttctctcgattcaaacactagggtttgatcgataattttatttataatttcctttacttcaattgcaattattcagatattcaaaatccaagctattttctttcatttaatctgaaattgattggattttccttttaattttgtttaatttaatctaagaaagaagggggaaaaatgccggcagtttacggatccagattgacgactttcgaggattcagaaaaagagagcgaatacggttatgttcgtaaggtgtctggaccagtcgtcgttgctgatggaatggctggtgctgccatgtatgaattagtccgtgttggacatgataatctaattggtgaaattattc

SEQ ID NO: 51374 - DNA, 384 bp, Gossypium hirsutum
  Clone ID: LIB3197-039-Q1-M1-A1
gatgtcggcaagggttgtgctgctgccttgaagcaagccggtgctcgcgtcattgtcaccgagattgatcccatctgtgcccttcaggctctcatggaaggacttcaagttttgacccttgaggatgttgtctccgaggctgatatctttgtcaccacgactggtaacaaggacatcatcatggttaaccacatgaggaagatgaagaacaatgccattgtttgcaacatcggtcacttcgacaatgaaattgacatgcttggtctcgagaattatcctggtgtcaagcgcattaccatcaagccttaaaccgataggtgggtcttccctgaaaccaacaccggcatcattgtgttggctgaaagacgtctcatgaactgggtt

SEQ ID NO: 51375 - DNA, 371 bp, Gossypium hirsutum
  Clone ID: LIB3197-039-Q1-M1-A10
aaagactagtttaaaacgctccccacacaccacaagcaagccacacccaattacaccgaatcagctatgaagctatcggttctcggcttcttctgtttcttcttcgctccctctctctgcagggtaccatctgaaacacatgtaaagactgaaccagaacatgctagcaccccaccaagaggttggaactcttatgattctttttgctggaccatatccgaggaagaattcttgcaaaatgctgaaattgtttctaaccgtcttaagccgcatggatatgagtatgttgtggtggattacctttggtatagaaggaaggtggaaggggcttgcactgattctcttggatttgatgtgattgatgaatgggg

SEQ ID NO: 51376 - DNA, 455 bp, Gossypium hirsutum
  Clone ID: LIB3197-039-Q1-M1-A12
ccacgcgtccgcaaaattcaaaaagctctctttttcatctcatggctgctactatcgtctccgtcaaagctaggcagatcttcgacagccgtggaaatccaacggttgaggttgatgtggaaacatcgaacggtataaaggctagggccgcagttcctagcggtgcatccactggaatttacgaggctcttgagttgagagatggaggttccgattacctcggtaaaggtgtatcgaaggctgttgctaatgttaacacaatcatcggccctgcattgattggaaaggacccaaccgagcagactgcaattgacaatttcatggttcaacaactggatggaacccaaaatgagtgggggtggtgcaaacaaaagcttggtgcaaatgccatttttgccgtgtcccttgctggttgcaaagctggagctgaagtcaagaaacttcccctttacaag

SEQ ID NO: 51377 - DNA, 169 bp, Gossypium hirsutum
  Clone ID: LIB3197-039-Q1-M1-A2
agtattgtttaattatttagtgagttgctactgttgagatgggcgtgtcaaaaatcattagaagctgaaagtgtgtactatgtcattcatacatatctattcttatatgtagatgagatatgtattaaattgcttgttttatggctataattggagttattcttctgtt

SEQ ID NO: 51378 - DNA, 352 bp, Gossypium hirsutum
  Clone ID: LIB3197-039-Q1-M1-A4
tcgcccacgcgttcgggatataagatatgatcgtagaattgttgaagcctggattgtctagtttcatgcttttagattaagtttcttgattaaatgaaacatggtaatgtataacatggcagtttgaaccaaaacattttaggtctgctaaaagtaatttttatgctagttggatcttcctatgctaaatgggggatgttattaagtagatgaaatatgatagaaaatatcactgaactggttggtttaagtattttttctaccctaattgtatatgatttatatttttgcagataggagacagaatttatatggcgaaagtacctttggtcaaattttaaaaagccgggat

SEQ ID NO: 51379 - DNA, 297 bp, Gossypium hirsutum
  Clone ID: LIB3197-039-Q1-M1-A5
aggtttcccatcatgaaaagagctcaaaatcggactaattagtcgctcttacaagcgtcaactctgttgcagttacagattcttttctagaagaagcatggcgtcaaatcatgagcaacctgggctttcctctctaggaaaggagggaaggtcttctggtgagactggtccataacatgaaccccttattaacgggattcacacttgtgaaagctattatgcttacactgctatccttccatttctctctccccctctagcatgacttctatatgaggtatgatgttggtgctacat

SEQ ID NO: 51380 - DNA, 411 bp, Gossypium hirsutum
  Clone ID: LIB3197-039-Q1-M1-A6
taagaatgtcattatgacgaatgaatatcagtccacaaggctgtgtgaggcactatataccaaatgtgaggacagaatggaccagcttcaagttcttagacttcctactatggcaaaatttgatgcaggtttacagcaatgtaaccaaagctttgagcaggagtgtgttgggccttcgaaagccaattacgagcaacgaataatgaagatgctgggaaagtcgcgttctctgtttatcaaggaatacaatcaaaggctcttcaattggttggtggccttctcccttgtcatgggggtgggtgggcggttcatcataaaattcattttggtcgaaatggcggcatggatactatttatattcttagagacatatacgaagatgttctggtcagcggagtctctttactacaa

SEQ ID NO: 51381 - DNA, 379 bp, Gossypium hirsutum
  Clone ID: LIB3197-039-Q1-M1-A7
cggacgcgtggggttttatctatcatcttcctaatcctaatctgtacccgtcatacctcttaaacctttcatttcatcaccatctttttgcagtttctctttatgggtgaaagtgaaactcttaaaagctgctaagagggaagtgaattaaaggagagatgataaagaagccacaaaaggtcaacatgtttattaaaaaatggtctgagcttgattggcgtcttctcttcttagtcgtcgttcccctttcgtttctgttttttgtttcttccttaacttctacgcatctcaattctgtcgtctcgctccgctcctttatcttcagcaacttgtcggattttataagtttacatccccactcggccaacgctgttcggtc

SEQ ID NO: 51382 - DNA, 337 bp, Gossypium hirsutum
  Clone ID: LIB3197-039-Q1-M1-A8
ggattctacaatcatcaaatttctctcaggcttttcatcgagcaggagctatgatacggctgttcaaagtaaaggaaaagcagagagaacttgctgaaaacgcaaatggcggatcacctatcaaaaagcaatctgcaggggagttgcgtttacacaaagacatttctgagctgaacctgcctaaatcatgttccatatcatttccaaatggaaaggaagacctgatgaatttcgaggtttcaattcgacctgatgaaggatattatttcggtggcacatttttgttctccttccaagtttctcccatctatccgcacgaggcaccaaaagttaaatg

SEQ ID NO: 51383 - DNA, 363 bp, Gossypium hirsutum
  Clone ID: LIB3197-039-Q1-M1-B1
cccacgcgtccgcggacgcgtgggcaaagaagccggctattgaggttgagatagacagtcaatcttttgtgttagatttcttgcatatgtttcgattggagctgaaaactggcatgagacaccccattgcttggattgatgaagcaggtggctgtttctttcctgagatttttactggtgaggatgaagcatacccgtgctgcaaagatgaatgtgcgaatgaccaagaattcatgtttagtgaatcttatgcccctcgtgagatcaagctacatcttgagattggcattaatggtgttgagcagccaaagttggaatgtagtggggagtcgagttcttttgtgagacattttcaaattgctc

SEQ ID NO: 51384 - DNA, 420 bp, Gossypium hirsutum
  Clone ID: LIB3197-039-Q1-M1-B10
cccacgcgtccgcacttccaaacggtagcggttcgaatgccgcaacaagccccgaaaccgcagcaacgacaaccgcaattaccgtcacatcgaacacggcgccgtcctcgaaactgagccatctaacggaatcgttaaaattagagcaccaattcttgcgtgttccttttgaacatttcaagaaaacaatccgaaccaatcaccgaacagtcgagaaagaagtctctgccgttatttcaagcgtcactgacgtggctgactccgacgaaatatccaaagacgatgccattttgagtctcacttcccttgtttcccgtttgcagggcatcaagcgcaagttggaagaggggagtcatgcagagaacttgcaagctcataggtgccgtgctcgtcttgatcacttagattcagcggatgctg

SEQ ID NO: 51385 - DNA, 434 bp, Gossypium hirsutum
  Clone ID: LIB3197-039-Q1-M1-B11
agggaacaaaaaagaaaaaaaagtagaaaggatccattggagttgctgtcaatggcgcagattgaggttcagcgtcaaccggcgatttccgtaccaaacgccgtcgctccgcaaaccggaggggtgcagttcataccgacgtcactatatgttggggatcttgatgttaccgttacggatgagcaactgtttcaattgtttggacaagttgctcgggttgcttccgtaaggatttgccgcgacttggctacgggccgttcactcggatacggttacgtcaactatagcaatcctcgtgatgcggctagggctttggatctacttaatttcactccactgaataataagcctattcgtatcatgtattctcaaagggaccctagtcttcgtaagagtggtactgcaaacatatttatcaagaatctggacaagtc

SEQ ID NO: 51386 - DNA, 413 bp, Gossypium hirsutum
  Clone ID: LIB3197-039-Q1-M1-B12
atagcatacagagatggagaggcaaagaagcaagcaggtttgtttgttgatgtgggttttggttgctgcctttttctcccacaatagggtcattgcagtgacctccactggccttggtgagcagaaaaactactatccagctcctgaccctcatgctggaactcccccttcaggttcacatggcacaccaccatcttcaggaggtggatcacctctctctcatggaaccccgtcacatggaggtggttaccacccttcaccaacaccatcaacgccttcgggtggaaattgtggaactcccccacatgacccttcaactccatcaacaccatcacacactcctcctcatggtactccaccatcatctggaagtggtagtcccccatcgtatggaggaggcagtcccccatcgt

SEQ ID NO: 51387 - DNA, 453 bp, Gossypium hirsutum
  Clone ID: LIB3197-039-Q1-M1-B2
ccagaatcaacgtaagaattagggttgtgtctagaaatggcgattgcagcgcgcatcagatccactctccctctctttcacaggcttttgagatccgattccctgccttctcacactcccagagctgctcttcaccgaactctactttgtcccgaactgtcgaggaaatattccacttctccgaagaaggacgagaatgttaaggtgcctttggctttgtttggtggatctggaaactatgcatctgcactgtaccttgcagccgtaaaaggaaatgctctggacaaggttgagtctgaacttcttgaccttgttcaggcatcaaaaaacagtcaattcttttctcaattcactaaggacttgtcagtacctgcagagacacgggtcaaagccattaatgagatatgtggccaagctaaattttcagatcttacaaagaactttttgggtata

SEQ ID NO: 51388 - DNA, 451 bp, Gossypium hirsutum
  Clone ID: LIB3197-039-Q1-M1-B3
gtttaaatcataattgcttgctaagatgcaaaattcattcaagtaaaataaaaagaacaagagaaaattctgctggttccatacttggtgttgtgcctgtcattgttttcagaaccggctgctagcaatgaactacataaatgaaggagatgatgataaactttttgaggctcacagggattggggaaggcgatttatgaggttatatccacaatacgattcgtgggacaaccctaaagatccagaacgacctcttgttattggatacatttctccagattattttacacattctgtctcttatttcattgaagcccctcttatttatcatgactatgggaaataccaggtggttgtttattcagcagtagtaaaggctgatgcaaaaactaatagatttagggaaagagtcgttaaaaagggtgggctatggagagatatatatggtatc

SEQ ID NO: 51389 - DNA, 455 bp, Gossypium hirsutum
  Clone ID: LIB3197-039-Q1-M1-B4
atccgaaggtggagtcgccgcacctgccggaacggatgaatgtttggacaaagcaaccaaccaagaattagccagtaataatggggttgaagccttgaatgctgtctctcaagggaatccagaaatatccaagggtgaaagtttttcaatgtcacctgaggtttctgagatctgtgaaatgccagatcataacacgattgatgacactccattgaaagctgataagataccggagaatgatggaaagatgtcgaagagtgaggcaactgcagaccatgattcttcttcggaagagaaatgtgggagtattgtagaagaaacaagccaaaatgctgatgttgagtccaataaacaagaggctaacttagaactcaagaaacaagctttgagtgataaccatgatctgataattgaaagctcgaatgaggcctatgaaatagttagcaaggacgatc

SEQ ID NO: 51390 - DNA, 425 bp, Gossypium hirsutum
  Clone ID: LIB3197-039-Q1-M1-B5
gccagcttttgcttggttatggtatggacttatggctaaataagtataaaatctctaacagaaactaaaaaaaaaaaaaaattataaagaaagacgaataaggaaaaaagggtgttaaagaccaaaggccaaagccattttttctttcttttggtttctggggagagaccagtttgggcaaagatggtgaagaagtggaaaaaggctttgattttggtgctgtttacagtctgcattctggggtttaagccaagatgtgtcaatggcgaaacagatcaagcagatgcttctgctctaggggttatgtataccagcttaaattcaccacagcagctaacaggttggactgctagcaatggtgatccatgtgggcagtcctggaaaggtgttacttgctcgaacaaacgcgttactgaaattaaact

SEQ ID NO: 51391 - DNA, 430 bp, Gossypium hirsutum
  unsure (1)..(430): unsure at all n locations; Clone ID: LIB3197-039-Q1-M1-B6
gttgaagtagtaatatctatagcatacagagatggagaggcaaagaagcaagcaggtttgtttgttgatgtgggttttggttgctgcctttttctcccacaatagggtcattgcagtgacctccactggccttggtgagcagaaaaactactatccagctcctgaccctcatgctggaactcccccttcaggttcacatggcacaccaccatcttcaggaggtggatcacctccctctcatggaaccccgtcacatggaggtggttaccacccttcaccaacaccatcaacgccttcgggtggaaattgtggaactcccccacatgacccttcaactccatcaacaccatcacacactcctnctcatggtactccaccatcatctggaggtggtagtcccccatcgtatggaggaggcagtcccccatcg

SEQ ID NO: 51392 - DNA, 385 bp, Gossypium hirsutum
  Clone ID: LIB3197-039-Q1-M1-B7
aaaaaatattccagctatcctacgcaccgaagttatccggtgcacgttagcatcaccaccaaccaaaagcaacgaccagcgccaccaccactgccgtcgcagctaccatcatggctactcactctcgacctccgccaccaagaccacttgacctcgacttgacgatcgtgtcagccaagcatctaaagaacgtcaactggcaaaacggcgatctaaaaccctacgcagtcttctgggttgatccagaccgacgtttatcaacccggtcggacgattctggctcaactcgacccgtctggaatgagcgtttcacccttccccttgttgttcctccacacgaaaccgttttgaccctcgagatctttcattccaaaccctctgaaac

SEQ ID NO: 51393 - DNA, 426 bp, Gossypium hirsutum
  Clone ID: LIB3197-039-Q1-M1-B8
cccacgcgtccgcggacgcgtgggcgacaatccccacccagcagctaacttcttgtttttatttttgttcttcagtctgaaaatcagtgagagatcgaagagatggcctttttccttggacaaagtagccttgcgaaccacttccgatcttatcagaaggcagaggcttccatggctgtgccaacacgagcatttcatgttgaacttggggatcgtgagaaagctctcttggcaaaggacccttcgttaagtcgttttaaatcttataagaagagtgtgtcgacactgaagagaattggggatgttcttacagttgttgttgtagcaggttgttgctatgaaatttatgtcaaggcagtaatgcgagaagaagctaggaacaaggcaaaggctggtggtggaagtaaatgaggctgtgcaagcttt

SEQ ID NO: 51394 - DNA, 441 bp, Gossypium hirsutum
  Clone ID: LIB3197-039-Q1-M1-B9
gccttgttccggacgagggttcgaccgattcttcgtcggcttctaagatccggtattctccgggaagtttatcacccgtcatggatttcacgacgatctccaacggtcattcaccctcgagtttcactaagttcaactctgcactcactgcgggtcttttaaacccgcattctccgccgcctccgccggacaagtcacgatctagtccaacccttttcgagatgatggctagcgaacccgatgtccacccaaggacccaaacccagatccaagtacccatttcaggtcctagacaaaaccaacccccaccagtcattgacaaacaggcgttgacaatgcagcggatttcaaaccttttgtcaacccggagccccggaaaccagttcaacgatccggattcgagtgatataaagctaacgttgagttccaaggatgggatta

SEQ ID NO: 51395 - DNA, 423 bp, Gossypium hirsutum
  Clone ID: LIB3197-039-Q1-M1-C1
cggacgcgtgggcacgccccctcttacttatatcattcaataattttcatcaacaaagaaaaatgagagagtgtatttcgattcacattggtcaggccggaattcaggtcggaaatgcttgttgggaactttactgtctcgagcatggcattcagcctgatggccaaatgcctagtgacaagactgttggtggaggagacgatgctttcaacacctttttcagcgaaaccggtgccggaaaacacgtccctcgagctatatttgttgatctggagcctactgttatcgatgaagtgaggactggaacataccgccaactgttccaccctgagcaactcatcagtggtaaagaagacgctgcaaacaattttgctcgtggccattatacaattggaaaagagattgttgacctctgcttggatc

SEQ ID NO: 51396 - DNA, 416 bp, Gossypium hirsutum
  Clone ID: LIB3197-039-Q1-M1-C10
aaaatctttgtgggatttagatgttaacaagcatcacaactctgcaaattattctcaaaatttattgctttaaataagaattcaagctatttgccttagattatgtatatgccctcactatcattcttagtgcaatctgcatctgtggttacaagttacagcaaacaaataaagctggcattctgatccataaacttagtttgtctgtcgattgacatgacatcatgaatcattcgcatttcgttagcgaattgtgatattctataagtttcagagtcacgcctttagtaataatgctaaagctggatgaacagacaccaactatggattcctatatccatttgtttaaaatggtgtattagccctagacaagaatcctttctgaatgaaaaaatcttaatcaagaaacatgagat

SEQ ID NO: 51397 - DNA, 293 bp, Gossypium hirsutum
  Clone ID: LIB3197-039-Q1-M1-C11
ttttttttttttttttttttttttttttttttttttttttttttttttttttttttttttttttttttttttttttttttttttttttggggaaaaaaaaaaaaaaaaattaaagggaagtttttttagaaataaattaaattttgggttaggggaagaaaaaaaaaccagttttttttatcgttttaaaaaaaaaaaaaaaaaaaaaaatggggggccggcttaaaatataaaaaaaaatatttgcccggagagggaatactgaaattttttttttagggagactataatat

SEQ ID NO: 51398 - DNA, 423 bp, Gossypium hirsutum
  Clone ID: LIB3197-039-Q1-M1-C12
cccacgcgtccgaaaaaaaggcctctcaaaatgtacaaagtccaaggttgcatggatttctcagctaataattttcattagagaagtagtgcaactttgttctcgagattcatcttgtgttgtattcggtttaggcgcgtaaaagacgtgcttcagataattgatccaagagagttgtgctcttagtcatggattctttgtggaagcttttgtatttgcttgagcctgccccactgactctcatacttacagcagtggctgtgacatttggatctgcatttcgtgctctgaattatgggaaagaaatggagcggaactgtgacttgtcggaagcatcaattactctagatcggtcccaagcattaatgatcccaataatgagctcctgcagcttgcttttgatgtttacctttttcttctgct

SEQ ID NO: 51399 - DNA, 180 bp, Gossypium hirsutum
  Clone ID: LIB3197-039-Q1-M1-C2
cggacgcgtggggtgaaataggcgagcaagtgccattagcctataatatacacatttcctatagtgaaccaaactattaagtttgaactctagaggtgatatccataatgtctgaaatttgattgttgatgattgaccatgatatttatggttttcattattgaaatacttttttattat

SEQ ID NO: 51400 - DNA, 387 bp, Gossypium hirsutum
  Clone ID: LIB3197-039-Q1-M1-C3
aaaggaaatgcctgggctaacctgcaacgcctgcaacagagaattccttgacgaggccgagcggaagctccattacaagtccgattggcaccgctacaatctcaagcgcaaggtagctggggttccaggggtgacggaagctttgttcctggcaaggcaagcagcacttgctgaagagaaagataagcagaatgaaacccccatgctttacagttgtggtctttgtgacaagggctatcgaagttccaaggcttactctcagcatcttaagtcacgtgctcatattgcgcaggcttctcaacaccctgaagaggagaaggcagccattatcaagccatttatacgtcgtgctgtaaataagcctccacaaccaagggatacaaatga

SEQ ID NO: 51401 - DNA, 447 bp, Gossypium hirsutum
  Clone ID: LIB3197-039-Q1-M1-C4
ctttttccaagacacaaatggactgttgttcaaggcaattccagcttcccttggagtcagtgcaactaaagagtaccatgtcaattctcttgctgttccacggaaagcaaaagaagctattggaggaattactaaactcactcatagtgatgggagatcgatggtgatcaacgtggaatacaatcagcttgatcctctgcttagagccaccggacatccagatggagatgttaattgtgagaccggttattctccttttccaggaaatataaaccaattgattttggagcttggtccatacattaaggagctcaccaaaacaggaggtgctattaaggaatttgttaaccccaagtataaagatgctagtaaaacatcatttaagtcctcaactcgactagagtgtatgatgcaagactatcctaaaacattgcccccatcagcaag

SEQ ID NO: 51402 - DNA, 445 bp, Gossypium hirsutum
  Clone ID: LIB3197-039-Q1-M1-C6
ctctcacttctgccttgatatccttagatcaagatctcttctgatttaaccttggttgagaaatggaggaaactttgctccatgggactttacatgctacgatctatgaagttgataggcttcatgatggaggtggaaacttctttggcaagcttgtggcaaatgttcaggagactattggcattggcaaaggagttccaaagatttatgcaactattgatcttgaaagggccagagttggacgaaccagaacaatagaaaatgaaacttccaaccctaggtggtatgagtctttccacatttactgtgcccataatgcttccaatgtggtgttcactgtcaaagacgacaatcctattggagcaactctgattggaagagcatatgtccctgttaaggatctcacagaaggggatgaagtggataggtgggttgaatcctggat

SEQ ID NO: 51403 - DNA, 435 bp, Gossypium hirsutum
  Clone ID: LIB3197-039-Q1-M1-C7
cggacgcgtgggcacgccccctcttacttatatcattcaataattttcatcaacaaagaaaaatgagagagtgtatttcgattcacattggtcaggccggaattcaggtcggaaatgcttgttgggaactttactgtctcgagcatggcattcagcctgatggccaaatgcctagtgacaagactgttggtggaggagacgatgctttcaacacctttttcagcgaaaccggtgccggaaaacacgtccctcgagctatatttgttgatctggagcctactgttatcgatgaagtgaggactggaacataccgccaactgttccaccctgagcaactcatcagtggtaaagaagacgctgcaaacaattttgctcgtggccattatacaattggaaaagagattgttgacctctgcttggatcgtatccgaaagc

SEQ ID NO: 51404 - DNA, 406 bp, Gossypium hirsutum
  Clone ID: LIB3197-039-Q1-M1-C8
cattactctcgattccacttaacgcaaatagttcgagtttcgtaatcaatggctttgccgaaccaacagactgttgattatccgagcttcaagctcgttatcgtcggcgatggaggcactggaaagaccacatttgtgaagaggcatctgactggagagtttgaaaagaaatacgagccaacgatcggtgtggaggttcaccctttggacttcttcactaactgtgggaaaattcgattctactgctgggatactgccggtcaggaaaagtttggtggtcttcgagatggttactacatccatgggcaatgtgctataattatgtttgacgttactgcccgtttgacatacaagaatgttcctacctggcatcgtgatctttgcagggtgtgcgagaatattccta

SEQ ID NO: 51405 - DNA, 371 bp, Gossypium hirsutum
  Clone ID: LIB3197-039-Q1-M1-C9
acaacactcctctttctctctgttctatccctctctatacacatggcaaaggtgaagatcggtatcaacggattcggtaggatcggtaggttggtggctcgagttgctttaaaaagagacgatgttgaactcgtcgctgttaacgatccttttatcactactgattacatgacatatatgttcaagtacgacagtgttcacgggcaatggaagcatcatgaactcaaagtcaaggattcgaagacccttctgtttggcgagaagccagtcactgttttcggtattaggaacccagaggagattccatggggcgagaccggagctgaatacattgttgaatcaactggagtgttcactgacaaagacaaggc

SEQ ID NO: 51406 - DNA, 408 bp, Gossypium hirsutum
  Clone ID: LIB3197-039-Q1-M1-D10
cttcccattgctcctttcaattctcttcatcatctcccctgttttctgtgacaatgatgaggaagatgatcttcttaaaggcatcaatagttaccgagcttcgttaaacttgacaagcctaacaacaaatgagaacgccgagtgccttgcttatgaactagccgaagaattcaagaaccaaccttgcacaaactccacaggcgccaacacagtcccaggcaccgaaccacagtttgccaactatccaaacattttagccaaatgccatttgaatgtttctgtcacaagggacagagcagtaatgcctgcttgtgttccgaacctggctcctagtcttgtgctcactaattttacgcagtctcaatactctgaaaacctcaatgaaaccaagtatacaggaatcgggat

SEQ ID NO: 51407 - DNA, 426 bp, Gossypium hirsutum
  Clone ID: LIB3197-039-Q1-M1-D11
gttaaaggctgtcatgatgtatacgcttcttttgacaagtatgtagaggttgagcgccttgaaggtgataataaatatcatgccgaacaatatggcttgcaggatgctaagaagggtgtcttgtttattgacttccctccggtccttcagcttcagcttaagcgatttgaatatgattttatgcgggacactatggtcaagattaatgatcgctatgagttccctttgcaacttgaccttgaccgagatggtggaaaatacttatcaccagatgctgataggagagtcccgaaatctttatacgcttcacagtttggttacagtgtcctcgttcacagtggtggggtgcatggtggacattattatgcatttatcaggccgactctttctgatcaatggtataaatttgatgatgaaagagtaacg

SEQ ID NO: 51408 - DNA, 445 bp, Gossypium hirsutum
  Clone ID: LIB3197-039-Q1-M1-D12
tttcaagctcaattctctgaaaatttttgtgctgaacttcttttttctctttgtaccaccatgtgtggaggtgctattatctccgatttcataccgccgtcgcggtcgcgacgattgacggccgatttcttgtggcccgatctgaaaaaatccgggttgaagaaggggtcgggtaagagatactcgaagcccgtgatcgacttgggcgatgatttcgagactgactttcaggagttcaaagatgaagaatctgatatagatgattatgatgttgatgatgttttggctgatgtaaagccctttgcttttaacgctacaaagaaacctgcttctgctgtatctcatggttcgaactctgaaaaatccatgcaattcaatggtcaagctgagaaatgtgcgaaaagaaagaggaagaaccagtatcgtggaatccggcagcgcccat

SEQ ID NO: 51409 - DNA, 182 bp, Gossypium hirsutum
  Clone ID: LIB3197-039-Q1-M1-D2
gagcagtctgtctttggcattggctatgcggagcggcgtctaactcaagtgacatgttcataactagacaacaactatgatttacctgatggacaaatgataaccgtcggttcttaccgtgccaaacgcccccatgtgcttttccaaccatgctgtatctgcttggaagcttctaacgtcaa

SEQ ID NO: 51410 - DNA, 421 bp, Gossypium hirsutum
  Clone ID: LIB3197-039-Q1-M1-D4
cccacgcgtccggtcgttggataagcttgttccacgagccgattcgtcaagaagagaggatagtgttggatcatcttcatcctggttcaggaagggtgttgaatagtataaaaggtgaacaggttgcagcagggtggccttcttggcttgttgctgtggctagtgatgctctcaagggatggataccccgacgggccaacaccttcgaaaagttggataaaattggccaaggaacttatagtagtgtgtacaaggcacgtgatgtcgttcataataaactcgtggctttgaaaaaagtgcggtttgataatcatgaccctgagagtgtgaagtttatggcaagggagattaatctcttacgaagactcaatcatccaaatgttataaaattgggaagcttgatcacatcccatacgtcatg

SEQ ID NO: 51411 - DNA, 447 bp, Gossypium hirsutum
  Clone ID: LIB3197-039-Q1-M1-D5
caagtagcaatggcgagttctctgctagtgaatggcttaaaagctctcttcttagttctgtggtgcttgatggtaaccactctcatttacaccatctccattgatggcctccctttccgctgggaaattcttactccgtggatggctgcaacgttggttgatttctacattaatgttgtacctttcgcggtttgggtttcctacaaggaatcaagtttgattgctgcaacactttgggtaattctgcttgtatgtcttggaagtattacaacatctggctacctttttattcaatttttcaacttgtctcctcaagaatctctggaagatcccatttatcatgttctattggaaccaagcgagcaaggatggtacaaaacctaaagggaaacattcctctgttgcgattgcaagaatactctttatcgttttgggttgcttgatgct

SEQ ID NO: 51412 - DNA, 429 bp, Gossypium hirsutum
  Clone ID: LIB3197-039-Q1-M1-D6
aagctgtcttacattgcccttgactatgaacaggagctagagacctcaaaaacaagttcatcagtagagaagagctatgagttacctgatggtcaggttattaccattggtgctgaacgtttcaaatgccccgaagtgcttttccaaccatccttgattggtatggaagctgctggcatccatgagactacatacaatgcaataatgaagggtgatgtggatatcaggaaggacttgtatggtaacattgtccttagaggtggtacaaccatgttcccgggtattgcggacagaatgagcaaggagctttctgcactcgctcctagcagcatgaagatcaaggttgtcgctccacctgagcgaaagtacagtgtctggatcggaggctcgatcttggcttgcctcagcaccttccaacaaatgtggatc

SEQ ID NO: 51413 - DNA, 332 bp, Gossypium hirsutum
  Clone ID: LIB3197-039-Q1-M1-D7
caaaaggacgatgatatgcctccaattgaagcaattcttgcacccttggaggctgagctgaagcttgctcggcaagagattgcaaagcttcaagatgataacaaagctctcgatcgtctaactaaatcaaaagaagcagctttaattgatgctgaaagaactgtagagtttgcattggcgaaagcttccatggtagatgatctccaaaataaaaaccaggaattgatgaagcagatagaaatttgccaggaagaaaacaaaattttggacaaaatgcatcgccaaaaggttgcagaggttgaaaagcttatgcaaacagttagggagctgga

SEQ ID NO: 51414 - DNA, 433 bp, Gossypium hirsutum
  unsure (1)..(433): unsure at all n locations; Clone ID: LIB3197-039-Q1-M1-D8
ttcaaatctgcagcatttcctttctgttttctcctctgtattcaggttaagataataaaaaaaacccatcggtgctttgggattttcggcttggacggtattaacacattggaccaattttctgctttgagatggctggactatttgcttatggcagccttgcaccaaagactaagaatatggtagtcgcggggggtttgacagcatttgtatttggtgtatatttctatactatgagagctgttggaggtacagatgagcttcaggtggctatagataagttcgaggagctgaaaaagcaagaggggaagtgaagcatgggatcaaagccttgatctcattagcctttttttgtgacaatgcagtcaaaaactaggtaaaaggtcatttatatgacagacanaataatgtgttaaaatctgtgttttgaaaa

SEQ ID NO: 51415 - DNA, 452 bp, Gossypium hirsutum
  Clone ID: LIB3197-039-Q1-M1-E10
cccacgcgtccgggcactctttcaaactaaccaaaacgaggccgccggattttggtttcagcagcttgtatttagaaggatggtgagggtcagcattttgaatgatgcactgaagagcatgtacaatgcagaaaagaggggcaaacggcaggtcatgatcaggccatcctcaaaagtgatcatcaagttccttttggtcatgcagaagcacggttacattggagagtttgagtacgttgatgatcacagatctggtaaaattgtagttgaactgaacagaaggctgaacaagtgcggggtgatcagtcctcgcttcgacgtaggagtgaaggagatcgagggttggactgccaggctgcttccatcaagacagtttgggtacatagtgctgacaacatcagctggaataatggaccatgaagaagccagaagaaagaatgtaggtggaaaag

SEQ ID NO: 51416 - DNA, 441 bp, Gossypium hirsutum
  Clone ID: LIB3197-039-Q1-M1-E12
ctcattcattctcagtcttttcatcatatcattggctttggctttggagtttgcaaaaccaaagaagggttttcaattttcaagctgcctcccacttgtaatatctttctcctaggtttttcagttttcttttgtctatggctgcttctgattctgacgatgtgaaccttgcctatgacgatactgctgacgacgattacttctatctcgacgatacggatgaggacttacatccaccccaagccagcgacagccttgatgacgatcaactccaaggcagcgacagccgtaatgacgatgatgacgatctactccaaagcagcgacaggcatgatgacggtgatcatgattgtgacgacaacgatgatggtgatgagaatgcacttgaaaaagatgatcatgattccccaatatctggccaaaactttagtgttttaactg

SEQ ID NO: 51417 - DNA, 458 bp, Gossypium hirsutum
  Clone ID: LIB3197-039-Q1-M1-E4
cagtttttcctttaagaaaaaaagcagtagaactccttcattccaactcagtgctcatggatgcgcaagaaggaactcagcagtcacagcagctaatccttgctcacaaagtcttcctcctcaagcaccgggatgtccctgacatcgagaaggtccgactcaaggatgaggtcctaaacaccgtcaaatccaattatatgactccatattatgaaaacctagtcgcggacaaggtgctggacctggaccacagcgttttggactcgatgcgtgcaaagaatgaggaagagattaaaaagatcgacgaaaagattgctgatgctgaagaaaacttatgtgaaagtgaagttcgagaagcacatttagctaaattcttatatttcattcagattggtgaaaaggagaaagcattggagcaactgaaggtgacagaaaacaagacagttgctgttgggcaa

SEQ ID NO: 51418 - DNA, 452 bp, Gossypium hirsutum
  Clone ID: LIB3197-039-Q1-M1-E5
cgatcctgagaatgtgcgttatatattgagttccaacagttctgtttatttgaaaggtcctgaatggctgaaacagtttgatatcttcggcgaagcacttttcaattccgacggtgaggcatggaaatgtcaccgcagagttttccatgctttcttgaatcaccctcagtaccggcaatcactttcaaaggttctccatcaacgtatagaggaagcgcttgttaaagttcttgaatatgtttctggacgagagatggtggtgaacttgcaagatttgttggtagggcatgcgtttgacattggatgcataacgggcgtgggcttcaaccctggcctactctccattgaattccctgagaatcggttccaaaaagccatgagtgatactctggaggcagctttttacagatatgtagtgcctgacagtctttggaagttgcagagttggcttc

SEQ ID NO: 51419 - DNA, 459 bp, Gossypium hirsutum
  Clone ID: LIB3197-039-Q1-M1-E6
cccacgcgtccgagccctctctatgtgcttctaaatcctgcaatcaatcctgcccaaaaggatcttcccgtcacaatttatgaaagtgagctgcatgtcatagatggggttccacagcttatttttgtccgttcaagctacacaattgagacagttgaagcagaaaggatctctgtggatcatgttgcccatctaaagccatctggaggttcagcagcaactcaatggaattgtttatgtttgtatgtttttcctgcatccagtggctgctcagcttaccggtatacatagcgccatcaagatgttgaatagcagaatcagggtgcttcatcaatatcttgttggaatgcaaaaaggtgatattccttgcgaaagttcactgttaaggcaagtatcaagccttctccgaaggttacctgcaattgaatcagaaaaatttcaagatgactttctaatgga

SEQ ID NO: 51420 - DNA, 418 bp, Gossypium hirsutum
  Clone ID: LIB3197-039-Q1-M1-F10
ctcttacattacctacaaaatctttgctttccctttttttttttttttgccaatggcttcttcaccaaaattcatctcttacttcttccttttagccctcttctccgttgaaatacatggtagggatttttttagcaaaatcccaagtgttaacacaaatgagaaagaggtgaccaacaaagaagaacaaaccactttggggaagaaggagcaagagccaaggtttgtccccgagacccaaaatggctatgggctttacggtcacgagtctggtcagctccctcctagcaccgccagtaccaaagaaacctatgaaccctatgtcacacctgttaaataccaccctgatgaaccctacaatagcatcccagcgtccaaaaccaacaacaaagactcttacttttatagcaagacaaat

SEQ ID NO: 51421 - DNA, 357 bp, Gossypium hirsutum
  Clone ID: LIB3197-039-Q1-M1-F11
ttcattggttttcgattatcaactcttgcgtcacagttctccttttgactggtttccttgcaacgattcttctgcgggttttgaaaaatgatttcattaaagtttggccaaaataaaaaaccacctgatgaccaaaaaaaacctggatggaaatatattcacggagatgtattccggttcccaaagtacaaatctttgtttgctgctgctcttggatctggaactcagctgtttactttaaccgttttcatttttatgcttgcattggttggtgtcttttatccgtacaatcgaggagctctattcactgcccttgtggtcatatatgcacttacatcaggaattgcaggatatact

SEQ ID NO: 51422 - DNA, 459 bp, Gossypium hirsutum
  Clone ID: LIB3197-039-Q1-M1-F12
tttgcccaccactatcaaatttccagattttccaggaaaaagaaaatcaaaacccccaggtgaagaaggtgaaaaccagcagcggcaaaggcaataaaaggtgaagccaaagagagagagatatatacataataaaaaagacttttcaaaagaacacaactatggctcctcatagagaaggatcagatgcttcagtggaagccatggttgctcaagtcgaaaaacacccaatttcatcgatccttatcatcattgctatgcaaacagaagctttgccggtggtgaataagttccagttgattgaaaaccctcattcttcgtttccaaaaggggtcccttggatccattatcatggtgcatacaaggacatcataatcaatctagtttggcctggaaaagatttaacctttggggttgatagtgttggcacgatttctgcctctcttgtgacctatgcat

SEQ ID NO: 51423 - DNA, 355 bp, Gossypium hirsutum
  Clone ID: LIB3197-039-Q1-M1-F4
atatccgcctctctcatcttccgttgtttatacgtttggttgttgttgaagaagtgctactaccatggctacaaagaagagcgttggggacttgaaggaagctgatttgaagggaaagaaagtgtttgttagagtcgatctgaacgttccattggatgataacttcaacataactgatgacacaaggatccgtgccgctgttcccaccatcaagtatttgatgggtcatggctctaaagtcatcctctctagtcatttgggacgcccaaagggtgtcactcccaagtacagtttgaagcctcttgtgccaaggttatctgaactccttggagtcgaggttaaaatggcaaatgac

SEQ ID NO: 51424 - DNA, 393 bp, Gossypium hirsutum
  Clone ID: LIB3197-039-Q1-M1-F6
atgtggactcccaggaccccagggtcaacctggtgcagcagggatccctggtgacccgggctccccaggaaaggatggagtgcctggcattcgaggaggaaaaggagatgttggcttcatgggtccccggggcctcaagggtgaacggggagtgaagggagcctgtggccttgatggagagaagggagacaagggagaagctggtcccccaggccgccctgggctggcaggacacaaaggagagatgggggagcctggtgtgccgggccagtcgggggcccctggcaaggagggcctgatcggtcccaagggtgaccgaggctttgatgggcagccaggccccaagggtgaccagggcgagaaaggggaacggggaaccccaggaattggggg

SEQ ID NO: 51425 - DNA, 443 bp, Gossypium hirsutum
  Clone ID: LIB3197-039-Q1-M1-G10
cccacgcgtccgcttaaaacccctcaaaaggactgcctcaaacaaggaagtcaatggcgttttctgagttcaggccactagacgagaagtcgctcatcgaatacattaaagcaacgccgtctttgtcatcgaagatcgtcgacaactatgatggtttaaagattaaggaagttggagatggcaatcttaattttgtctacatcatcgttgccccttctggttcttttgtaatcaagcaggcacttccctacatacgatgtattggggaatcttggcccatgactaaggaaagagcatatttcgaagtgttagcgttaaaacaacatggtgcgttatgcccagaacatgttcctgaagtttatcactttgaccgtaccatgtccttgattggaatgcggtatttagagccgccccatataatcctgagaaaaggttaattgctg

SEQ ID NO: 51426 - DNA, 374 bp, Gossypium hirsutum
  Clone ID: LIB3197-039-Q1-M1-G11
ctcaacccctacattttactacgctctctgaaatcttagttacatccatggcggcgacatcgctaaatgcccctaacgctcctatccttcaaaagacccatcaaactcatgtctttctcaaacccatcttcaccattccttgtgaaacctctgccaagcgcttatccatctcttgttccgcaactacccaagatcgcctctccgtccaatcccaatctcaagatcgggtctttaacttcgccgccggtcccgccaccttacccgagaacgtcctcctcaaagcccaatccgagctttacaactggcacggatctggcatgagcgttatggaaatgagccaccgtggtaaggatttccgttctattatcgaaaaa

SEQ ID NO: 51427 - DNA, 420 bp, Gossypium hirsutum
  Clone ID: LIB3197-039-Q1-M1-G4
gcaagtataaataatcgggaaggggagagagagttgggagatgaacggaatggggagacaggggaagagatctggtgcggcagggttgcaggttcaccatcagagacaatactcggataacttcttggaaacgacatccaatggaaggtggcttcagtctgctggccttcagcatcttcactcttctaacaactctattcctcctcttcaggattatgcattttatggcggtggagatgggggaggacaagggtctagaatgtataggaatatacagagggaattcagtatggggaatgactttttcacggagcctacaactcctccggttggttcacggccgtcaagccagaggatgaatggtgatcagtcacccaatgagttcagtccaggcctcttagatctgcattcttttgatac

SEQ ID NO: 51428 - DNA, 440 bp, Gossypium hirsutum
  Clone ID: LIB3197-039-Q1-M1-G5
cggacgcgtgggaaaaaaaatcgcagtttcaacaatggcagatgcagcaaacaacgttgtcgagacgatcaacggtgattgtcacgattttaagtctcttctctcttcttcagacagggatttcctcgtacgcaacaacggtgatcaggttaaaatcgatagcttgaaggggaagaaacttggattgtatttctcagcatcttggtgcggtccatgccgtagattcaccccaaatttaatcgaggtgtacaccgagctctcaacgaaaggcgatttcgaggtcatttttgtctcggcagatgaagatgaagagtcattcaatggttacttctccaagatgccatggcttgcaatccctttctctgattcagaggcacgcaagcgcttagatgagccggtcagtgtgatgggaatacctcacctcgtgctcttggatgaaa

SEQ ID NO: 51429 - DNA, 433 bp, Gossypium hirsutum
  Clone ID: LIB3197-039-Q1-M1-G6
aatccctttctttgtcctaaacatcctccttttcctctccagctccgcggctacaccaaagagcggtgcagatcacgacctggtccgttcatcatgtgtccacgccagctatccaagcctctgttttcgcaccctttcttcctactccggcccagccaacaccccacgtgagttagcccaagccgccgtaaaagtcagactgtcccgtgcccgtaaagtgtcgaactacttgtcgacgagtgtgacggggtacaacaagagggaacgagtcgcactgagtgactgcgtggagcaaatagatgagtcgatggaggagttgagcaagacattaggggagttgaagcacttgagaggggagacgttcgagtttcagatgagtaatgcgcggacatgggtgagtgcggcgctgacgaatgaggacacgtgtcttgat

SEQ ID NO: 51430 - DNA, 376 bp, Gossypium hirsutum
  Clone ID: LIB3197-039-Q1-M1-H10
atcagttcaatatttcctggtaaacaggaaggcattgcagtaggaaggacttttgctgctcttaagaattataaagtggatggtaacaaggaaatgatggctattgggctgatgaacatggttggctcctccacttcttgctacattacaactggcgccttctctcgatcagcggttaatcacaatgcaggagcgaaaagtgcagtgtctaacatagtaatgtcgattacggttatggtgacccttctctttctcatgcctttattccagtacaccccaaacgtggtgttgggagctatcattgtgtcagctgtagttggccttatagacattccagcagcctgtcaaatttggaagatcgacaaattcgatttca

SEQ ID NO: 51431 - DNA, 342 bp, Gossypium hirsutum
  Clone ID: LIB3197-039-Q1-M1-H11
ggccgttgcaacttcttcttcaagagacggcttttttttttcttttcttttcttgactttctgggttttcgtttttgttcctttcactgtcccctcgccagaaggccggttgagttatttacacggttgggagcttttggaggattcttcctcatctttaaggctttttgttttcggtcaatggaggtaattttgtcattgctggcgatggatagcggaatctatgtgaaggtgccatcttatgctcgtttcctactagggatttcccataggttgcaaagtggttcaaccatactccgagtatgacatgtatcattgctgacttcagacggcaaccagctt

SEQ ID NO: 51432 - DNA, 380 bp, Gossypium hirsutum
  Clone ID: LIB3197-039-Q1-M1-H12
aagagtcctggtccatgtggccaacgcctatggacttcgagtccgaggaccctgagaatgaagtcataaaaccaacaatcaatggagtgctaagcatcatgaaagcttgcgccaaagccaaaactgttagaaggttagtgttcacatcatcagctggaactattgatgttgcagaacaacaaaagccctgttatgatgaaacctgttggagcgaccttgaattcatccaggccaaaaaaatgactggttggatgtattttgtctccaagacaatggcagagcaagcagcctggaaattcgctaaagaaaataacattgattttgtcagcataataccacctttggtgggtcgtccatttattatgcaatcaatggccgcc

SEQ ID NO: 51433 - DNA, 389 bp, Gossypium hirsutum
  Clone ID: LIB3197-039-Q1-M1-H5
gatccttgcacccttgagaagttccttgggagaatccccatggtgttcaatgttgtgattctcactccccacggatacttcgctcaagacaatgttttggggtatcccgacaccggtggccaggttgtttacatcttggatcaagtccgagctttggagaatgagatgctcctccgtataaagcaacaaggactcaacatcacccctcgaatcctcattattactagacttcttcctgatgctgtcggaacaacatgcggtcaacgacttgagaaagtatacggaacagagcactcggatattcttcgagtacccttcagaacagaaaagggaattgttcgtaaatggatctcaagatttgaagtctggccatacttggaaacctacac

SEQ ID NO: 51434 - DNA, 195 bp, Gossypium hirsutum
  Clone ID: LIB3197-039-Q1-M1-H6
gttccatgtggccacgcctatggacttctagtacctggaccctgataatgaccttataaatcgaacgaccagtggcgagctaaatatgccgtaagctcgtgccatagactgaactgtttaatgtttacgatcggatcactaccctgatcaattgtttaagcaccatcgattattcattcttgctggaagaaattg

SEQ ID NO: 51435 - DNA, 341 bp, Gossypium hirsutum
  Clone ID: LIB3197-039-Q1-M1-H9
atgggagctccagcccttctcacactcaacccgcagaaaccacccaccttcaccatgtctgacgaggaagttgaacaggtggaggagcagtacgaagaagaagaggaagcccaggaggaagaggaagttcaagaagaggagaaaccaagacccaaactcactgctcctaagattccagaaggggagaaagtggacttcgatgacatccagaagaagcgtcagaacaaagatctaatggagctccaggccctcatcgacagccactttgaagcccggaagaaggaggaggaggagctggtcgccctcaaggagagaattgagatgcgccgtgcggagagagc

SEQ ID NO: 51436 - DNA, 443 bp, Gossypium hirsutum
  Clone ID: LIB3197-040-Q1-M1-A10
cggacgcgtgggctgcaggatttccagcaacctcctttgagtaggtgtgggatacagttgtagctcctcatcttcacaagttccatggaatattaaatggaattgacttagatatttgggatccgtacaatgataagttcattcctgtaccttacacttcagaaaatgttgttgaaggcaaacgagctgccaaggaagccttgcagcaaaagcttggtttgaagaaatctgatcatcctttggttggaatcattactcgcttaactcaccaaaaaggaatccatcttatcaagcatgcaatttggaacaccttaaaacgcaatggacagggtgtattgcttggctcagctcctgatcctcgcatccaaaatgattttgtgaatttggccaatcaactgcattcatctcattcggatcaggctcgcctttgtttgacctatgat

SEQ ID NO: 51437 - DNA, 459 bp, Gossypium hirsutum
  Clone ID: LIB3197-040-Q1-M1-A11
cggacgcgtgggtggcgtagccctcgtcctccatcaccctctttggcagctcaacgcttgatacgggaacagcaagatgatgagtattatgcatcattgcaagctgacagagaaaaagagttgaaagcaattgaagaagccaaagctcgccgtttagaggaagaagcagctagaaaagctgctcttgaagaagaacagcgaaaagaggaagagcttcgcaggaaagtggaggaggagcaggaatgtgagagacaattagctgctaaagaagcttctctgcctcaagagccagcagccaatgagcaaaacgcagtaacccttcttgtgcgaatgccagatggcagtcgcaggggccgccggtttctcaagtctgatagactgcagtctctatatgacttcatcgatattggtagaggagtgaagccaggcacttatagactggtgaggccatacccaagg

SEQ ID NO: 51438 - DNA, 224 bp, Gossypium hirsutum
  Clone ID: LIB3197-040-Q1-M1-A12
tcgcggacgcgtggggaaacctatgaaccgtatgtcacacctgttaaataccaccctgattaaccctacaatcgcatcccagcgtccaattccaactacaaggactcttacttttatagcaagactaatgcgttcggaaacactgatacttaaagtttagacgggtaaaatgataaaggatggactatcgaggaaaccaacatctacaatggcaacttttacaa

SEQ ID NO: 51439 - DNA, 320 bp, Gossypium hirsutum
  Clone ID: LIB3197-040-Q1-M1-A2
cctggaactcaggcgagaagtgcgatcaggttgaagaacactagtaaatctcacgtagctttcaagtttcaaactactgcgccgaagagttgttttatgcgtccacctggtggtattttggcgccaggggaaagcattatcgcaaccgtgtttaaatttgtagagcgtccggagaataatgaggtgcaggtggatttaaagagtaaagttaaatttaagataatgagtttgaaggtaacagctggagtggattacttgcctgagctttttgatgaacaaagggatcaagtgactgtagaaagaattttgcgggttgtatt

SEQ ID NO: 51440 - DNA, 335 bp, Gossypium hirsutum
  Clone ID: LIB3197-040-Q1-M1-A3
gggagagagtgtatcagtgtttcttcccctctttacttaatttctctccgccatggctctctccgtcgagaaaaccgccgccggccgtgagtacaaggtcaaagacatgtctcaggctgacttcggtcgtctcgagatcgagttagctgaggttgaaatgcctggtttaatggcttgtagaaccgagttcggccctgcccaacctttcaaaggagccaaaattactggttctcttcacatgaccatccaaaccgccgttcttattgaaacccttaccgccctcggagctgaagtccgttggtgttcttgcaacattttctctacccaagaccacg

SEQ ID NO: 51441 - DNA, 358 bp, Gossypium hirsutum
  Clone ID: LIB3197-040-Q1-M1-A4
gtgatacattgtaccagtgcgtgaacaactatatatctgctaaaaacaggatctctgtccacgctactgctgtaggtacaattggaacctgcggtttagactcgtggagtttaggcaacgacacttactggcttagagagaataatccgacaatctacgtccatcggcaccacgtattctggcaaggttgcattcaggaactgtgtgcatctggagctattacgcacagaccatggataagacgcttgaacgcactggcttaactgaattgctatgcacatttagatgacccaaacgatgggatggtgctggagctgactacatgtctatctccgtttacgattccatctcggtggat

SEQ ID NO: 51442 - DNA, 380 bp, Gossypium hirsutum
  unsure (1)..(380): unsure at all n locations; Clone ID: LIB3197-040-Q1-M1-A5
gtggagggggaaggagaggcggttatggtggaggaggcggtggtggtggtggtggangcncccnatgttataagtgtggtgagatgggccatttagcacgggactgtgggcagggtggcggtggcggtggaggcagatatggcggaggcggaggcgggggcggcggtgcttgttacaactgtggaggctctgggcatttcgctagggagtgccccaacagtggtcgctaattttgaggagggatttaaatgtgtcactcgcatctcctccgatccatcctttttttcctcttccgctactgtttctggcggtttggttattattgtatggtttgctttttatgttttccttttccagtttatgcaagacgattttctctt

SEQ ID NO: 51443 - DNA, 418 bp, Gossypium hirsutum
  Clone ID: LIB3197-040-Q1-M1-A6
agaaattacatctttattattattatagtagaaataggttttcttaatttattacataagtacggtacccagcctaagcttacataatattgtatacacggtataaggatcatggacgaggcttgtgtggctcgggatgatgacctggaccacctggtcctggcggtggcgcatgggggcctggcccaggaggaggagcatggcataattattgagtttgttgatgattataattcaaggcgaagtgccacatatttacctgaggtgccggcacatgaaggttggactagagtggaggcaattgactcacttattcggaaggcaggtttcagtggccccataacggagtcgctcaggaagcgtataaaactgacccgttaccaaagcacattatttaccatgcactacagtgactatg

SEQ ID NO: 51444 - DNA, 306 bp, Gossypium hirsutum
  unsure (1)..(306): unsure at all n locations; Clone ID: LIB3197-040-Q1-M1-A7
aagaccccatagtaaaattccacaaccggaccataaaaagtcactagaaagtaaaaacatcagtgcattgtattccacgagagatctccattattttcattttccatttataatttttaataattttcaacacctaaaaaattgcttcaaaccctagctatgggttttgtttcacaaaaaatgtaacagaaccttgcagatctgaccccccagattttgnccttcttctgtnttgtttcttgaacttgctttttctttttgctgatgaatgtcttttttgatcatcaattgcactgttttatactg

SEQ ID NO: 51445 - DNA, 324 bp, Gossypium hirsutum
  Clone ID: LIB3197-040-Q1-M1-A8
agaaggtgtcttaataaacgccttctttcttcttcttctccctttctttgctttttcgaatttttcttaagcgagaatgagagagtgcatttcgattcacatcggtcaggccggtatccaggtcggaaacgcctgctgggagctttactgcctcgagcatggaatccagcctgatggtcagatgccaagtgacaaaactgtcggaggaggtgatgatgcttttaacacctttttcagtgaaactggtgctgggaagcacgtccctcgtgccgtctttgtggatcttgaacccactgttattgatgaagtgagaactggtgctta

SEQ ID NO: 51446 - DNA, 369 bp, Gossypium hirsutum
  Clone ID: LIB3197-040-Q1-M1-A9
gaaactctctgctagggtttcttttccatgccgccgccgccaccgctcaagccattccacggcctccgacgacgccccgacctccgatcgcgacggaggtggaccgattcgacggtttcggctaaagattcagccaactggggatgtacgtgggacacgtacgtgcgcaaagggtggtggtgcagggctgatgtgcggcggctagggttgaaggttgtatgctgctagggttgctgctggaatttagttagtgggctgtttagtttgggttaggtgttgggccattctaggtttagttgggcccgggcattattgggtttgacaaatttacctagcagtttggttttagctaagatgttatgactgcac

SEQ ID NO: 51447 - DNA, 431 bp, Gossypium hirsutum
  Clone ID: LIB3197-040-Q1-M1-B10
attggtttgagctggccagaacctccactaaatttgctatctcagcatgttttggacagaccagcttctttcaaatcagtcaaatcttttagagcaaccaagtcttttcgaacatatagttccttcaggtccataaatgacatggcatcaggaatagctttgcttgcagaacttgaccttgaatccctcatgaagcggaaaagaagatcttcatatgtaagaatagttagcaagcaaatggtaggaattttcctcactatttgggtccgtaggagtttgcgcaagcatattcagaatttgaaggtgtctactgttggtgttggtgtaatgggctacattggtaacaagggatctatatcagtcagcatgtccatatatcaaacacttttttgttttatatgcacccacctgacatcaggtgaaaaagatgg

SEQ ID NO: 51448 - DNA, 173 bp, Gossypium hirsutum
  Clone ID: LIB3197-040-Q1-M1-B2
cccctggatatgggttggagtagtaaagttttaattacatgctatatttatgcttttaaagaaccagttcacattatggtttgaaattgatatacttaggagggataatattatgtttagtgatcagaatcatttttctagtccatttaaaatgtgttgacgttttggatctt

SEQ ID NO: 51449 - DNA, 398 bp, Gossypium hirsutum
  Clone ID: LIB3197-040-Q1-M1-B3
gtttgagctagctagctcttactcaaatggcaaccaaaacgatgatgttgcaaatattttcacttttcttctttttgttcagtatctgcaactccattttccttggtgctaatggagatgacaatggtggttggcaaactgcccatgccaccttctacggtggtgctgatgctaccggcacaatggggggagcttgtggttatggaaacctgtacagtcaagggtatggaacgagcacagcagctttgagcactgcacttttcaacaatggcttgagctgcggtgcctgctacgagctccggtgcaacaatgatcctcaatggtgcattagtcgaaccataaccgtgacagccaccaacttttgtccccctaactatgctttatctagtgacaatggc

SEQ ID NO: 51450 - DNA, 407 bp, Gossypium hirsutum
  Clone ID: LIB3197-040-Q1-M1-B4
aaagggggggaaatggcgatcacactgaacaatggatttaagatgccagtggttggtttaggtgtttggcgtatggatggaaaagacgttagagacctcatcatcaactccatcaagcttggttatcgtcattttgattgtgctgctgactacaagaatgaagcagaagttggtgaggcattgtctgaagcattcaaaactgggcttgttaagagagaggacctctttattacaaccaagctttggaattctgatcacgggcatgttcttgaggcctgtaaagacagtcttaagaagcttcaattggattatctggatttgtatctagttcactttcccgttgctgtaaagcacactggagtcggtcaaacggacagtcctttggacaaggatggagtcctggacat

SEQ ID NO: 51451 - DNA, 457 bp, Gossypium hirsutum
  unsure (1)..(457): unsure at all n locations; Clone ID: LIB3197-040-Q1-M1-B5
attggtttgagctggccagaacctccactaaatttgctatctcagcatgttttggacagaccagcttctttcaaatcagtcaaatcttttagagcaaccaagtcttttcgaacatatagttccttcaggtccataaatgacatggcatcaggaatagctttgcttgcagaacttgaccttgaatccctcatgaagcggaaaagaagatcttcatatgtaagaatagttagcaagcaaatggtaggaattttcctcactatttgggtccgtaggagtttgcgcaagcatattcagaatttgaaggtgtctactgttggtgttggtgtaatgggctacattggtaacaagggatctatatcagtcagcatgtccatatatcaaacactnttttgttttatatgcacccacctgacatcaggtgaaaaagatggagacgaactgaaaagaanatctgatg

SEQ ID NO: 51452 - DNA, 452 bp, Gossypium hirsutum
  Clone ID: LIB3197-040-Q1-M1-B6
cccacgcgtccgcccacgcgtccgtgatttactggggaatggtactcctaggggaaagaaagatgctgctacagccttgtttaatctgtcaatatttcacgaaaataaggcccgaattgtgcaagctggtgctgttagacaccttgtggagttgatggacccagctgctggaatggttgataaggctgttgctgttttagcaaatcttgctacgattcctgaagggaggacttcaattgggcaggagcaagggattcctgtgctggttgaggtcgttgaattgggttcagcaaggggaaaggaaaatgccgcggctgctcttttacagctctgcacaaacagtaataggttttgcagtctggttctccaagaaggtgctgtcccaccgctagttgccttgtcccagtctggtacacccagggctagagagaaggcacagacacttctgagtg

SEQ ID NO: 51453 - DNA, 373 bp, Gossypium hirsutum
  Clone ID: LIB3197-040-Q1-M1-B7
ctctcatcattttccttctgctaccttctctcaacccaaacacatatttcccaggaaaaagaaaaagcttgagcgaacaagaaaatggccgatcagcttaccgacgatcagatctctgaattcaaggaggcctttagcctgttcgacaaggatggagatggttgcattactaccaaggagttgggaactgtgatgcgatcacttgggcagaaccccactgaggcagaactgcaagatatgattaatgaagtcgatgctgatggaaatgggaccattgattttcctgaattccttaacctgatggcaagaaaaatgaaggatacagactctgaggaggagcttaaagaggcattcagggttgttgacaaggatc

SEQ ID NO: 51454 - DNA, 353 bp, Gossypium hirsutum
  Clone ID: LIB3197-040-Q1-M1-B8
agaggtaccaaaaccaatattgatgccaatttcaggaaaggagcaaaagtgtgttgggaatatatttagttgcagttttaatgcaagagagaagaaactgatatgtgtgaccagtggcaactcttacttgggttctttcattgtcaaagagctattggctcatggttaccttgttcgagtaaccattcaacacccagctgaatttgaagatgtgaaagacctgctaggggtggaagatttaaacctattggaaagtgtagttgtaaccaagatggaagatttacaaagcctttgtgatgcttttagaggttgccatgctgtttttcatacatcttccttcattgatccacatg

SEQ ID NO: 51455 - DNA, 380 bp, Gossypium hirsutum
  unsure (1)..(380): unsure at all n locations; Clone ID: LIB3197-040-Q1-M1-B9
catttgatccccccttttctgttgccggaactgagagtcccagatccgattaaaaaaaatgaaggtgatagataagatccagtctttctcacaggaccaagggaaagtggttttttcctttgagttcttccctccaaagactgaggatggagtggacaacctgtttgagagaatggatcgaatggtggctcataatccatctttttgtgacatcacatggggtgctggtggttccactgcggatctcactttggacattgctaacaagatgcaaaacatgatatgtgtggaaacaatgatgcatctcacttgcaccaacatgcctgttgagaaaatngaccatgctcttgagaccattaagtctaatggcatcaaaatgt

SEQ ID NO: 51456 - DNA, 336 bp, Gossypium hirsutum
  Clone ID: LIB3197-040-Q1-M1-C1
aaaatgcaggcgcatgtgtaattcatatgacacgtgaacttcttcagctttctccatcttcggaacttacgaaggagacttctagcgatctttcctttatgattacatgcgaaaaaccaaatccaagccaaggaacacctgcatcactgaaacgaattatggctttgaacttccacaggatactacgatgccatagttactataattgaaacaagcatgcagcatgaggaacttgtccgattgctcactacataacacttacgggaggcaacgccatatgcaatttttcatgcatgatgggcagcacgtttaccatttgcaaattagcctatttga

SEQ ID NO: 51457 - DNA, 454 bp, Gossypium hirsutum
  Clone ID: LIB3197-040-Q1-M1-C10
gccaaagccatttttttttcttttggtttctgggaagagaccagtttgggcaaagatggtgaagaattggaaaaaggctttgattttggtgctgtttacagtctgcattctggggtttaagccaagatgtgttaatggcgaaacagatcaagcagatgcttctgctctaggggttatgtataccagcttaaattcaccacagcagctaacaggttggactgctagcaatggtgatccatgtgggcagtcctggaaaggtgttacttgctcgaacaaacgcgtcactgaaattaaactgtcaaatcttggactttccgggtcggtgggttacagctttcaaagtttgacatcattgaaagaattggacttgagccacaacaattttgcaggagatataccatattttactcttccgaacttgcagcgattaaatctcgagtataatcaatttact

SEQ ID NO: 51458 - DNA, 395 bp, Gossypium hirsutum
  Clone ID: LIB3197-040-Q1-M1-C12
cggacgcgtgggcgccatcttcaataatttcttccgttgatctttgttagagattagctttttaatttttcattatgggaaagatcaagatcggaatcaatggatttggaaggatcgggcgtttggttgcgagagttgctctccaaagcgatgatattgagctcgttgctgttaacgatcctttcatcaccactgaatacatgacgtacatgtttaagtacgacagtgttcacggtcaatggaagcatcatgagcttaaggtgaaggactcaaagacccttctctttggtgaaaagcctgtcacagttttcggtatcagaaaccctgaggaaatcccatgggctgaggctggagctgagtatgttgttgagtctactggtgtttttactgacaag

SEQ ID NO: 51459 - DNA, 321 bp, Gossypium hirsutum
  Clone ID: LIB3197-040-Q1-M1-C2
ggaagcgcttgttaaagttcttgaatatgtttctggacgagagatggtggtgaacttgcaagatttgttggtagggcatgcgtttgacattggatgcataacgggcgtgggcttcaaccctggcctactctccattgaattccctgagaatcggttccaaaaagccatgagtgatactctggaggcagctttttacagatatgtagtgcctgacagtctttggaagttgcagagttggcttcagattgggaaagagaagaaacggagtgatgcttggaaggctcttgatgatcttttaacacaatttatatcgacccaacg

SEQ ID NO: 51460 - DNA, 107 bp, Gossypium hirsutum
  Clone ID: LIB3197-040-Q1-M1-C4
aaaaaaaaaaacccagggggggagattttttcctaagccttgggccttcttcccctcaaattaattttgggaattttaaggttggcccattggttccccaaaccaaa

SEQ ID NO: 51461 - DNA, 114 bp, Gossypium hirsutum
  Clone ID: LIB3197-040-Q1-M1-C5
agaaactactgttgctcaagcttcaataactgaggcaccaactaagcttgaaacaaaggaagatgacaaaataatggaaactgaagtgaaagaagatgagattccagagaagat

SEQ ID NO: 51462 - DNA, 455 bp, Gossypium hirsutum
  Clone ID: LIB3197-040-Q1-M1-C6
ttcttctctactcttcgcattttctctcgctttccttcttatacctcaacccaaaatccaaacaagccttaaccatcaagagtagaataaagttttaaaataaagtatctgtctgcagtacctgattcttcaccagaaccaagaacaaccaaaacctaattccatactgcttattcggtgtttacagatccacctttgattcctcagatatatatattttttcaatccttgatccggttttgtggagatggcggacacagaccattgttgctcgacacaattgatcgatggagatggagagttcaatgtggttggacttgacaacttcatgcggactactaaattctctaactgtggcctctcttatgctgtcgtcgccatcatgggccctcaaagtagcgggaagagcaccctgttaaatcatcttttccaaacaaatttcagggagatggatg

SEQ ID NO: 51463 - DNA, 417 bp, Gossypium hirsutum
  Clone ID: LIB3197-040-Q1-M1-C7
gggagcagtaaaaatatcccctcaccaccgctactattattataccattactctactacagctgctatcattactacatacatgtccacccaaagtcgagcagttggcggcaccgagcacaactggtgccgagcggtggtcgggggaaccgggatagccgtcttggctatcatttcttccaaaaaccccgacgtttcacatcttaaaaatgccctccacaagctccaaatctcccatcccattcttaggtctcgcctccattacagtcctactgccaacagttactccttcgttacctccccctcccctttcattcaaatcaagtactttaaccattctacaacttgtcaaatccttgaaaacaaccaaaacatctcaccccttcatttgattctcggacacgagcttaaccaaacg

SEQ ID NO: 51464 - DNA, 420 bp, Gossypium hirsutum
  Clone ID: LIB3197-040-Q1-M1-C8
ctgaaattcagatattttgtgaggtatcaggatgaaagcactcattcttgttggtggatttggaacacgattgagaccgttgactcttagcgtcccaaagcctttggtggattttgctaacaaacccatgatactgcatcagattgaagctctcaaagctattggagttactgaagttgttctggccatcaattaccaaccagaggttatgttaaatttcctaaaagaatttgagaaaaagcttggcattaaaatcacctgctcacaggagactgaaccacttggcacagctggtcctattgctctggctagagacaagttgatcgatggctctggtgagccattttttggcctcaatagtgatggtataagtgaatatccactaaaagaaatggtaaattttcacaagggtcatggagg

SEQ ID NO: 51465 - DNA, 435 bp, Gossypium hirsutum
  Clone ID: LIB3197-040-Q1-M1-C9
ttttctttgctcctccttaagtgtttctatagggttttaattcgttcttctcattacctctcttttaacctttctcttttttgcttgctctctttgtttttcgagatctgtgcgttttcttcttttcaattagcttcttgaaagctttattttcttaagaacaggaaaccgctgaagagatggcaccaccaattgagactccaaccaagtcctctggctctcaccacgcttcacatactcctttgaatgaaaggattctttcatccatgagcacaaggtctgttgctgctcacccatggcatgatcttgagattggacctgtagctccaatggttttcaactgtctgattgaaatcccaaaaggacacatggtgatgtttgaactctacatgaaaactggtctgatcaaggttgatcgtgtgctttactcatcag

SEQ ID NO: 51466 - DNA, 351 bp, Gossypium hirsutum
  Clone ID: LIB3197-040-Q1-M1-D10
gcagtgaagaaagatgatggaaaggggttttattgttttggccttgacggtggttttcgccgcgacggtggttacggcggctgacgagagtgggttagcgaatgagtgcagcaaagatttccagagcgtgatgacttgcttaagctttgctcaaggaaaagcagcgtcgccgtcgaaggagtgttgtaattcagtggcggggattaaagagaataaacccaaatgtttgtgttatattttgcaacaaacacaaacttccggtgctcaaaatctcaaaagcttaggtgttcaagaagataagctgtttcagttaccgtcggcttgtcaattgaagaacgctagcgtcagtga

SEQ ID NO: 51467 - DNA, 403 bp, Gossypium hirsutum
  Clone ID: LIB3197-040-Q1-M1-D11
tttgaagctaaggattggaagtctctcaatgaacagatcgttaatttgtctaagaaacgtggtcaacttaagcaggcagtgactgcgatggttcagcaagcaatgcaatacattgatgaggcaccagatcttgaaactcgtatagagcttatcaagaccctgaacagtgtgtctgctggaaagatttatgttgaaattgagagagcaagattgatcaggagacttgcaaagattaaagaagaacagggccttattgctgaagctgcagatttaatgcaggaagttgcagtggaaacttttggtgccatggcaaaaactgagaaaattgccttcattcttgaacaagttcgcctctgcttagatcgccaggattatgtccgtgctcaaattctgtcaaggaaga

SEQ ID NO: 51468 - DNA, 451 bp, Gossypium hirsutum
  Clone ID: LIB3197-040-Q1-M1-D12
ctctcccgagaagtaaacagaaaagggaagaattttggtgaccggtgattcgtgagtattgtaaacagcagcagcagcaatggagctgttctacttcgtggtgttcggggcattgggagcggtggtggcagcattagagctaagcaagaacagcaaagatcgaatcaacacatcctctgctttcaattccttcaagaacaattatcttgtcgtttattctctcatgatggctggagactggctgcagggtccgtatgtttactatctttacagtacatatgggttcggaaaaggtgaaattggacaactttttattgccggttttgggtcctctatgttgttcgggacaattgtcggatctttagcagacaaacagggccgaaggagggcgtgtgttacttactgcataacttacatacttagttgcataacgaaacattctcctcaatac

SEQ ID NO: 51469 - DNA, 438 bp, Gossypium hirsutum
  Clone ID: LIB3197-040-Q1-M1-D2
ggtgaactgaatggcagattaaaaattaagggtgcagttgcccaacaatatctaagtacagaaagaatggaagaaaaagaagaagatgctgacagggccaacaggattacaccatcaagatcaaaagctattatacaaagacaaggagagggattccaaagcttttctagacatggcaggtgtgaaggacaagtccaaaattgttttagttgaagacccaattagtcaagaaaagaggttattggagaccagaaagaatgctaagatagagaaggcttctaaatccatctcccaagaagttgataggcttgctggccaagtgtcagcttttgaaacaataatcaccaaaggtgggaaagtagcggagaaagacttgattaattcgattgagctgctgatgaatcagttgcttaaattagatgggattacagccgatgg

SEQ ID NO: 51470 - DNA, 340 bp, Gossypium hirsutum
  Clone ID: LIB3197-040-Q1-M1-D3
cccatcagtcaagaattaaaccatggcaacgaatgaagtcaaagttttgggttcctggccgagtccatttgcgatgaggcctaggattgcccttaacctcaaatccctcacctatgaatacattgaagagaagttatgggaaggcaaaagcgagcttcttctccaatcaaaccctgtttacaagaaaatcccagtcctcattcacggcgataacaagccaatctgcgaatctctcatcatcgtacaatacatcgacgaggcttggtcttccggtccttctattcttccttctgacccctgtgaacgtgctgtcgctcggttttgggctgcatatcttgac

SEQ ID NO: 51471 - DNA, 458 bp, Gossypium hirsutum
  Clone ID: LIB3197-040-Q1-M1-D4
cggacgcgtgggaacaaaacaattttgaattgactctgttaaatggagaatgcagggagcatacaagaatgatatggttgggcttgagtttgatggcttcatacctggtggtccaaaactgaaaggtgatgtcgtcctcacatccatgctaggcatccatctggatcattcaaagtggtgggacttagcagctgttataatgattttgatagcttatagattacttttcttcatcattctcaagttcaaggagagagtgtcaccattgtttcgaactctttatacatggcgaacattgcagcacatgaaaaaacgaccttcttttaggaaaacatcagccttcccatccaagaggcaccaagttctacattcactgtcttctcaagagggtctaaactctccaattcactagaagcaacaaatcatgagtactatagtaatgctcttactggaatttg

SEQ ID NO: 51472 - DNA, 451 bp, Gossypium hirsutum
  unsure (1)..(451): unsure at all n locations; Clone ID: LIB3197-040-Q1-M1-D5
gtggagagccttttttgtgtagcgattctcagttagtcttttctttaagcttacagcttctctccagagttttataatgggtaaggagaaggttcacatcaaccttgttgtcattggccatgtcgactctggcaagtcgaccactaccggtcatttgatctacaagcttggtggtattgacaagcgtgtgattgagaggttcgagaaggaggctgctgaaatgaacaaaaggtcattcaagtatgcttgggtgcttgacaagcttaaggctgaacgtgaacgtggtatcaccattgatattgccctgtggaagtttgagaccaccaaatactattgcaccgttattgatgcacctggacaccgtgactntatcaagaacatgattaccggtacctcacaggctgactgtgctgttctcattattgactcgaccactggtggttttgaagct

SEQ ID NO: 51473 - DNA, 171 bp, Gossypium hirsutum
  Clone ID: LIB3197-040-Q1-M1-D6
ttttggggggagggtattacttctggtgagaatggttagggagaaaattgaaacttcaattgggaggagaaaaggttcccttgttaaatgggaaaaaattaaagaaaacgggaaaggtcttgggattgggggtttttcggatgatgatttggaaagatttgaaaagggttt

SEQ ID NO: 51474 - DNA, 310 bp, Gossypium hirsutum
  Clone ID: LIB3197-040-Q1-M1-D7
cgacaactctagggtttttcatcttggtgggccctcctctctagtttcatcgtaaagaaatatgcctaggtatgatgaccgacgcggtggcactcgttcgtatgttggtcatttgtcttcaaggacaagatcacgtgatctagaggacatgtttagcagatatgggagagtacgtgatgtgccgttaatgggaatctatcttggtccacctatattcttgggttggagatgccgatgatgcaagatatgcattgaatggtcgagacatggatggaagccggatgattgttgaatgtgccaaaggagtgcc

SEQ ID NO: 51475 - DNA, 399 bp, Gossypium hirsutum
  Clone ID: LIB3197-040-Q1-M1-D8
ctgagattttaggacagaacagccctaatcgtatttagcttcagttatatctcaccacgtcgtgcagtaattttcagattttcttttccctaatttccttcgtcttccacatccttgcgactcgaactgatttactcacaacagcactaaaaaaaaacaaaaacaaagaatctgtctgtaactgtcttttgcgtttctagcagttgaattgaaagttgagtggtcgactatgattctccggtcggtcataatggtggttgtggttgtggggattttatcctctgcgtcgcaagcattgcgattcgagctgcaatcgggacacaccaagtgcatctccgaagacatcaaaagcaattccatgacggtcggaaagtaccacgttgtcaacccaaacgaagc

SEQ ID NO: 51476 - DNA, 390 bp, Gossypium hirsutum
  Clone ID: LIB3197-040-Q1-M1-D9
cccacgcgtccgggtacactgactacaaatagtatccttctgatcatctctctcttcctgatagccaaacgatggctggtattccgatcagattcggaatcattgggtgtgccgagatagcccgcaaagtttctcgagctatccagcttgctcctaacgccactgtctccgccgttgccagccgctccttcgacaaagccgccaatttcgccaaggctaatggcttcccacctgacaccaagatctacggctcctacgagtcccttcttgacgaccccgacatcgacgccgtttatttgcctttacccactagcctccacctcaaatgggctgttttgacggctcagaaaaagaagcatctgctcacggagaagcccgtcgccttgagcg

SEQ ID NO: 51477 - DNA, 450 bp, Gossypium hirsutum
  unsure (1)..(450): unsure at all n locations; Clone ID: LIB3197-040-Q1-M1-E1
cagccattgggaatcccctgctttaaatttctatattccacaaaaatagcgtaacagagcaagaaacacagagaaaaggaaaaccccataatcatggctcgattaacattggtctcctccatcatccttatgctatgctgctttgccgcagcatcaactttcgaggattccaaccctattcggatggtatccgacggtctccgtggctacgagtcctctgttcttcgtgtcattggccatacacgtcacgctatctccttcgcccgttttgcttacaagcatggaaggaagtacgagacggtggaggaaatgaagcttcggtttcagattttcaaagagaatttggatttgatccgatccactaacaagaaaggcttatcttacactcttgctgntaatcagtttgctgattggagctgggacgagttccaaaaacacaggcttggagct

SEQ ID NO: 51478 - DNA, 433 bp, Gossypium hirsutum
  Clone ID: LIB3197-040-Q1-M1-E10
cttaattcccttcccttttctccatttttctactatttttctttttttctcttttcctcctttattgtcctttctaacaaaccgctgccgctgcctccacacactttccggcgtcttacctccgatgaggccagcttccttcccatcattcgaaatttaaatcctcaaatatatctatccaatccattgctccccatttcttcggcggttctctctcactctcggtctcttttcgaagttttcctgtcattcttttttagctttgggtatccacaggccaaaaaaacacatgctattgtaggaagagagttttcgtgagagagaaaccctatgttttctctggcgtttctggtttttgtgatttttgaaattctctgcttcaacggagactcatttcaggtgcaaaaatcatgaagcttccaattatttatgg

SEQ ID NO: 51479 - DNA, 458 bp, Gossypium hirsutum
  Clone ID: LIB3197-040-Q1-M1-E11
cggacgcgtgggttttcttgttccttccttcgccgtctattgctttttgttacctcgatttcaagtgaatcagaatgggtaaggaaaagactcacattaacattgtggttatcggccacgtcgattctgggaaatcaaccaccactggccacctgatttacaagcttggtggtattgacaagcgtgtgattgaaaggttcgagaaagaagctgctgagatgaacaagaggtcattcaagtatgcttgggtgcttgacaagctcaaggctgagcgtgagcgtggtatcaccattgatattgccttgtggaaatttgagaccacgaaatactactgcactgtgattgatgcacctggacaccgtgactttatcaagaatatgattactggtacgtcacaggctgactgtgctgttttgattattgattccaccactggtggttttgaggctggtatctcc

SEQ ID NO: 51480 - DNA, 459 bp, Gossypium hirsutum
  unsure (1)..(459): unsure at all n locations; Clone ID: LIB3197-040-Q1-M1-E12
cagacgctttaaatgatagtgcaaagcccacgaaggaaaaattcagccatatgttttccaagatgaaatgcacatgcattgatttgaatcagttttcaagattcatcaaagacatgaaagcactcttggttgacaaggtttatgttgtcaatgttttaggttattgtgcatacaactttgttttaggtgcttattcttattggggacctaaggctggttacaaaatttataatatgagtgatgcagacctgatatttggaggaataaccattgtctgtggaatattgggcacactagcaggaggctatgttctggatttgatgaaatccacaatccccaatgctttcaaagtagcttctctctgtaacaaacatttttggggcaatcttttgtttcactgccttttgttttcagaacatgtatgctttcttagcttttttctncagtggtgaactactg

SEQ ID NO: 51481 - DNA, 435 bp, Gossypium hirsutum
  Clone ID: LIB3197-040-Q1-M1-E2
cggacgcgtgggctgatatcgcggatgagctgaatattccttgggtggcggtttggttggctggccctagggcactcttccttcatttccagaccgatgttattcgccagcatgtaggaattaacagtccggaagacaaaacacttgattttcttcctgaattttctggcattcgtgttactgacttacctaatggaatagcctctggagacattgatgcccccatcccagcattgttgcataaaatgggagtgtcactgtcacgcgccacggcaattgttgcaaattcatacgaagacttagataatacagtggtgaacatgctgaaattaagattcagaatgttcctcaacgttggtcccttcaatctggtatcagtttctagttctaccgtggatgactcgcatgggtgcttggattgggtgagcaagcatg

SEQ ID NO: 51482 - DNA, 458 bp, Gossypium hirsutum
  Clone ID: LIB3197-040-Q1-M1-E3
gtttaattcttctttaattaaccgttaatcaaattgaaaatcatacttattttggatttacgaaaagaagtagctatcttttctttgattttcttgttcttgttaagtgatggaaaacaaagcggcggtgaggtttacattagggaagcaatcgtcgatggctccggagagagacagaggcgaagcggatgggaaagagaacgaggaaggagaggagatagacgaaggagttaggttgatgtacttggccaacgaaggtgatttggacggcattcgcgagctcttggactcggggatcaatgttaatttccgcgacatcgatgatcggacggctctccatattgcagcttgtcaaggacagaccgatgtcgtttccttgctccttcagcgcggcgctgacgtcgaatctacagatcgatggggaagcactcctttggcggatgctgtatattataaga

SEQ ID NO: 51483 - DNA, 430 bp, Gossypium hirsutum
  Clone ID: LIB3197-040-Q1-M1-E4
cggacgcgtgggtgacctcaaagctgccaccaataatttcagttcagataacatagtttctgaaagtggggaaaaagctcctaaccttgtttacaaaggtcgtttacagaacaggaaatggatcgctgttaagaagtttactgagatggcttggcctgactccaaacagtttgtggaagaagcatgtggagtgggaaagttgagacacaggaggctggccaatttgatagggtattgctgtgatggagatgaaaggctgcttgttgctgagtatatgatcaatgacactcttgctaagcatttgtttcattgggaaaatcaaaccatcgaatgggcaatgcgtttaagagtagctacgtgcattgctgaagctttagattattgtagtagtgagggccatccattataccatgatctaaatgcttacagg

SEQ ID NO: 51484 - DNA, 456 bp, Gossypium hirsutum
  Clone ID: LIB3197-040-Q1-M1-E5
aaaaaaaatcatacgcaatgagcactgctggtcaggttattcgttgcaaagctgcggtggcatgggaggcggggaagccactatcgatagaagaagtggaagtggcaccaccccaaaagcatgaagtccgtattaagattctcttcactgctttatgtcacactgatgtatactactgggagtgtaagggttacactcctctgtttcctcgtatacttggtcatgaagcctcagggatcgtggagagtgtgggtgagggtgtgaatgatttgaaacctggagatcatgtgctccctatcttcaccggagaatgcaaagaatgtcgccactgtctgtcagaagaaagcaataacatgtgcgaactgcttaggatcaactgcgaccgaggtgttatgcttgctgatgggaaaaccagattttccatcaacggcaagcctatctaccactttgttggaa

SEQ ID NO: 51485 - DNA, 424 bp, Gossypium hirsutum
  Clone ID: LIB3197-040-Q1-M1-E6
ctcttctctcccacacacaccattcaatatctcccataatctctttcaatttttttcttttttcaattctaaaaagaaaaaaaaacccaatttttgtttttttttctaagctatggatggaactggggttgttgcggtctatggaaatggagcaatgaccgaaactcataacaaatccactttctcagtgaaagtggggttagcccaaatgcttcgaggaggtgttataatggatgttgtcacccctgaacaagctcgtatcgctgaagaagccggagcttgtgccgtaatggctcttgaacgagtcccggctgatatccgggcccagggcggtgtggctcgaatgagtgacccacaactcattaaggaaattaagcaagctgttactatccctgtcatggctaaggctcgtattggtcatttc

SEQ ID NO: 51486 - DNA, 428 bp, Gossypium hirsutum
  Clone ID: LIB3197-040-Q1-M1-E7
gcaactgggagctcggatcagtttcagtggccaagttagaaattaccaacgaacaatttcacaagtggtgaacctgcttggggatgaaacttcggcagcaaattatttaagcaaatgcatttactcgatcggactcggcagcaacgattaccttaacaactatttcatgcccctttattactccaccagcaggcagtatacccccgagcaatttgctgatgttcttattcaacaatacactgagcagcttcaggctttgtataactatggggcaaggaagtttgcgttgattggggtgggtcagatcggttgcagtcccaatgaattagctcaatacagtggagatggtaaaacatgtgtggagagaatcaatgctgcaaaccggattttcaatgacaagcttaaagggctcgttgatcaattcaaca

SEQ ID NO: 51487 - DNA, 344 bp, Gossypium hirsutum
  Clone ID: LIB3197-040-Q1-M1-E8
cccactcgtagctggactcattttccgggggggaagtaacgactaggctggtattgctctcaatggactgcaccacctgctggaagaaactagtgcgatttaccctgggcaagcattcgttgctggcgccggaccgggaaggttcgattagtgtagccatctatgcggggatagacactagggtgaggctaatgtacatggctaacgagggggatctggaggggatttatgagcttttggactctggcaccaatgttaacttcaatgattttcacggtaggacgggccgttatgtattcgtctgacagggccttactgatgtgaaccggttgctcctttgatcg

SEQ ID NO: 51488 - DNA, 439 bp, Gossypium hirsutum
  Clone ID: LIB3197-040-Q1-M1-E9
ctcttctctcccacacacaccattcaatatctcccataatctctttcaatttttttcttttttcaattctaaaaagaaaaaaaaacccaatttttgtttttttttctaagctatggatggaactggggttgttgcggtctatggaaatggagcaatgaccgaaactcataacaaatccactttctcagtgaaagtggggttagcccaaatgcttcgaggaggtgttataatggatgttgtcacccctgaacaagctcgtatcgctgaagaagccggagcttgtgccgtaatggctcttgaacgagtcccggctgatatccgggcccagggcggtgtggctcgaatgagtgacccacaactcattaaggaaattaagcaagctgttactatccctgtcatggctaaggctcgtattggtcatttcgttgaagcccaaatc

SEQ ID NO: 51489 - DNA, 443 bp, Gossypium hirsutum
  Clone ID: LIB3197-040-Q1-M1-F1
taggaattctcctctgttgctttataagatgagattgatccagggaatagctaattttaggcgtctttacgctaattctatagacttgaacacaaaatcctacctctccacgacaaagcgtgcattttgcaggccaagtgaacacgcaaaggtcgttaacaccaccatcacttgttctccattttattgcagcaataacttaggatcgagatcccattcaagcagacccgaaatggaggggatagagcatagggtaatcaaagccaatggcataaatatgcacgtcgctgagaaagggaaaggccctgtaatccttttcctccatggattcccagagctctggtatacatggcgccatcagatcactgcttttgcctcgcttgggtaccgagctttggctcctgacctgcgtggatttggggaaacggaggcacccgatgatg

SEQ ID NO: 51490 - DNA, 379 bp, Gossypium hirsutum
  Clone ID: LIB3197-040-Q1-M1-F10
gtccctccttatctttgcacggagaatagagaaagactatcctatggaaggctacaacaatgcttctaaacacatagcaccggtggctttccctttcagcacccatgctgaccctcttatcaacattattcggcaactatcaaacgcttgccccgacaccatgttttccttccttagcacccaacaatcaaacagactcaacttttcccaaaaaccttgataaaattaagccttttaatgtatgggatggatcacctgaggggtatagctgtagggtgaatcctcatgagcccgacaactatttacttatggcagttgctgagactgtcataaatgctatagatgctgctgtgtctgaaactggtgaaccaattgattg

SEQ ID NO: 51491 - DNA, 458 bp, Gossypium hirsutum
  unsure (1)..(458): unsure at all n locations; Clone ID: LIB3197-040-Q1-M1-F12
gccagaacctgatgattctgagttggttatggatgatggagatgaaaatctagatattcaatgtcaaattagggctcaggggaaacatgcttatgaatcagattctgatggccttgctgacaatcaaaacaagtgtgagcctgatccggatgatttgcttcatgctgaaactctgcaactgaaacatcattctgtatccactgaaaacagttctcaatctcagatgactcttgggaaatcaacagccatgagttcaaatgaagagcctgatcctgatgattcgggtgcttcttcaagttctggaaatgtggttgaacctgtggtgatgccagctctggacaccaagattcagacaagtgagaccatagatgagccagatcctaatgatgtagaagcacaatctagcatttcgggatgtgtgaacagagcanattatgatcctcgtcatcacataacaa

SEQ ID NO: 51492 - DNA, 445 bp, Gossypium hirsutum
  Clone ID: LIB3197-040-Q1-M1-F3
gctttattcttgtaatctagtttgatggtgaaaagaaagcagcagcctcctccagaaatggagggtactggcggcgctgaagcggcggtggaggctgagaccggaatccaaccccaacgaaggtgtaccaaatctctgaaaacgcgagctcagatggataaacataacgagagctgtaaacgatatcgactgaaaattaaaatgaggcgtgaggagaaggaacaagagatcccaaagttgaaggatgaacaccagaagacgaaaatggagctagaggaatacaagtctaaaattggggttatgggaaatgagatccaacaacttaagagaaagcttgaggcacaggggcaaatgcttacttctttggaaaaggtggtagaatggtttgcgttgcagaccaatgtgcaaggcggtcaagttttagcaactacgggagctgttttac

SEQ ID NO: 51493 - DNA, 442 bp, Gossypium hirsutum
  Clone ID: LIB3197-040-Q1-M1-F4
gaaagctagaaaccagagagtaaaaaaccgcttgcaatttgtggggataaatcaacacatatagaatatcaaacactagcattttcagatctctaggatctcagaatttcaggggggataaatcaggaacttgttgcttgtttctcgataaaattctctttttctcttttagctcttttgtcttagctcatccgctccttcattctgttacttttacttgcctttcgattcatatttgtatgaaagcaagtcatttttaggatctgggtattgatcaaaaacaacaagttttgattttgtttttcaagtgaaaaaggttaaaaaggaaaggaatttcctttaaaagtaatggtggtttcagttcttgtggtactgaaagggacaccttttgctgggataagggtagaaaaaagactttagcttcatgtgaaggatggtggca

SEQ ID NO: 51494 - DNA, 436 bp, Gossypium hirsutum
  Clone ID: LIB3197-040-Q1-M1-F5
cggacgcgtgggctctcttcttaggtctgctgtatcttagttcttgattaattagccaatcacagcagccatgtctctcctcaatgatctcatcaacctcaacctcagcgacaccactgaaaagatcatagccgaatacatatggatcggtggatctggtatggatctgagaagcaaagcaaggactttgcctggaccagtgacggacccttcaaaactcccgaagtggaactacgatggttccagtaccaatcaagcacctggagatgacagtgaggtcattctttatcctcaagctatattcaaggatccatttagaaaaggaaacaacatcttggtgatgtgcgatgcttacacaccagccggcgaacccattcctaccaacaagagatttaatgcggccaagatctttagccaccctgatgttgttgctgag

SEQ ID NO: 51495 - DNA, 313 bp, Gossypium hirsutum
  Clone ID: LIB3197-040-Q1-M1-F6
gctcattgctacctttgtgatcctattccaagggggagtgtgatctgttcttattcactccatttctttaacccatggctctttgcgtggagaaaaccgccgccggccgtgagtacaaggtcaaggacatgtctcaggctgacttcggtcgtctcgagatcgagttggccgaggtcgaaatgcccggtctcatggcttgccgagccgagttcggccctgcccaacctttcaagggagccaaaatcaccggttctcttcacatgaccatccagaccgccgtcctcatcgaaaccctcaccgcccttcgagctga

SEQ ID NO: 51496 - DNA, 423 bp, Gossypium hirsutum
  Clone ID: LIB3197-040-Q1-M1-F7
cttctacgtagttcacacagtgattttagtgtaaaaacccgagatgggaaagaatacgacatcccaaagggtcacatcgttgcaacatctccagcatttgccaacaggcttccttacatttacaaggatccagacacatatgatcccgatagattctctgttgggagggaagaagacaaggtagctggggctttctcatatatttcctttggaggtggcaggcatggttgccttggtgaaccatttgcttaccttcagataaaggctatatggagccatttgttgaggaactttgaattggagcttgtgtcaccgtttcctgagattgattggaatgctatggtggttggtgtgaaaggaaaggtgatggttcattacaagcggcgacagctttctgttaattagccaaataatatttgcgag

SEQ ID NO: 51497 - DNA, 151 bp, Gossypium hirsutum
  unsure (1)..(151): unsure at all n locations; Clone ID: LIB3197-040-Q1-M1-F8
ggatgattcacatgatgaactctaaaacaaacatcttcgatggctgctgccacggaaaaaagattgatactgttaagtgtttagtgaaatgagataatactgtactaattttggtagaattttaaatgggagaaaaaaaaaaactttcncc

SEQ ID NO: 51498 - DNA, 457 bp, Gossypium hirsutum
  Clone ID: LIB3197-040-Q1-M1-F9
cccacgcgtccgcttgggctgtcccttggtgggtgtttctttaggttttcttggtcgcgacgattttcagtggcttgtaaatggcagcgtataggctcctgattttctccctctttttggccctagttttcaccaggattggagccgatgcctcaactgaaccgctgcttgaatcggacgccgccgattcttctgctcttaagatggagttggatcaactgaagtctaagatccgtcttcttgaatcaaatgttgaggagaaaattcgagaattgaaaaccaaggatgagatgataaagcagaaagataaaattatagaagaaaaatctgacaccatggcatcgttgcactctgaattatcatctcttcagaaaaaaggaaccccatatgctgaggaacgggtgggaaaagctcatgcgaaagctctttgattgcagaaacaggttgatagacttaa

SEQ ID NO: 51499 - DNA, 84 bp, Gossypium hirsutum
  Clone ID: LIB3197-040-Q1-M1-G1
aggacacttggtttccaatctttaattctttgttgtgaaagaactatactgtatcacatacatagatggagaggcaaatatgca

SEQ ID NO: 51500 - DNA, 402 bp, Gossypium hirsutum
  Clone ID: LIB3197-040-Q1-M1-G10
ccacctacagtgcaaaaattagccaaaactcaaactgctagtcgccaccagccacctttgttttaagatttgctcaattgtcacggcgccttcggcgaggagcggcagcagcttcttccttctccgcctcttcagccttttctccactgcttccttcaccatttgatgtttcagcaacctctggtttcttctctactattggttgtttcttcccaccaaaaatgagcttgaagaaaatcgtgagaataatcaccacaatagagaccaagacaccaatggtgaggttcggctgtgtctcagcatgctcaataagatcgagaatttgatgcttgtatttgcttaaggaaaggaatgtcaggcaccttgtataagacatcaaaaaccttcctctgaaagtctgcg

SEQ ID NO: 51501 - DNA, 366 bp, Gossypium hirsutum
  Clone ID: LIB3197-040-Q1-M1-G11
cccacgcgtccgggcaagaaatccaagttgggtttcactgtcttcccatcaccccaggtctccacatctgttgttgagccctacaacagtgtcctctcaactcactcccttttggagcacactgatgtggctgttcttcttgacaatgaggctatctatgacatttgcaggcgctctcttgacattgagcgacccacttacaccaatcttaaccgtcttgtctcccaggtgatctcctctttgactgcttcacttaggttcgatggtgccttgaacgtggatgtaacagaattccagaccaacttggtcccttacccaagaatacacttcatgctttcttcatacgctccagtcatctccgctgag

SEQ ID NO: 51502 - DNA, 391 bp, Gossypium hirsutum
  unsure (1)..(391): unsure at all n locations; Clone ID: LIB3197-040-Q1-M1-G12
gaagaaggttatcatttctgctcccagtaaggatgctcccatgtttgttgtgggtgtcaatgagaaggaatataagcctgaccttaacattgtctccaatgctagttgcaccaccaactgtcttgccccattggctaaggtgatcaacgataaatttggcattgttgagggtcttatgaccaccgtccattctattactgctacacaaaagactgttgatggtccttccatgaaggactggagaggtggtagagctgcttccttcaatatcattcctagcagcactggagctgccaaggctgtcggcaaagttttgccagcactgaatggcaagctgactggaatggctntccgtgttcccactgttgatgtctctgtggttgacctcact

SEQ ID NO: 51503 - DNA, 442 bp, Gossypium hirsutum
  Clone ID: LIB3197-040-Q1-M1-G2
ggaatacgatattgtgaatttgattgcgttgggagtgatctcatggacgacagtttttctacttgtccgaaaaatcttctccgaccgctcctttgaactttgcaaccgcattgtttctacaatccatgggattttggctgtgattttagcctcgctctctgttgaagattggagctgccctgtttgtcctttggcttcggcttctacgcctaagcagaggcaagttttggctgttaccgtcgcttatcttatatatgacctcatatgctgcctctttgacgtcaaattcactcttgacaatacagttcatcacttggtcagcatcgttggtcttgcagctggccttgcctttcaattgtgtggatcagaacaagttgctgccttattcataacggagatctcaagtcctttcctccacgccagggaactgcttaaagaattc

SEQ ID NO: 51504 - DNA, 457 bp, Gossypium hirsutum
  Clone ID: LIB3197-040-Q1-M1-G3
ggcaaaaccatttattttggccaggcttctgaagcatacgagttctttgctcaagccggatttccatgccctgccttgagaaatccatctgaccattttcttagatgcatcaattctgactttgatagagttaaggctactctcaaaggatccatgaaattacggtttgaggcaagtgatgatcccctggagaagattaccacaactgaagctatccgaactcttattaacttctaccgtacatcacatcaatgttatgccgcgaaggaaaaggttgatgagatatccaaagttagaggaaccgtgctagattccggaggcagtcaagctagtttcttgatgcagtcttacactttaaccaagcgttcattcgtgaacatgtctcgagacttcggctattattggctaaggctgctcatatatgttgttgtcactgtttgcattggaaccatttatc

SEQ ID NO: 51505 - DNA, 405 bp, Gossypium hirsutum
  unsure (1)..(405): unsure at all n locations; Clone ID: LIB3197-040-Q1-M1-G4
atccaagtaggccaccaacgcaacctcctctctgcttttgtttccagtctggcggaggcgcaaaaacctctgctcttcaaaaccattaaaatcaaaatcccaatttgcatcacatttcatccaaatctgaaatgcccaaatcaaattcatccaattcctcctcagatgaggatgtaaaagcacctaatatgtttgaaagagcaaaggaagagatagaagctgtgattcatgttgggaaaatacatccttttggtaaggaaactcatgggaagcgagatgatattaatgaaaacaccccattggatgatgtgaaagcacccaatgtgtttgaaagagtaaaggaggagtttgaggcccttgttgaaacagtccatcatanaaaagagtctcaaactcatgttgatg

SEQ ID NO: 51506 - DNA, 387 bp, Gossypium hirsutum
  Clone ID: LIB3197-040-Q1-M1-G5
atttttgtatatattagtccataatctctccatgtgagcaataggaaaattttgagtgttgtttggctttgttttctctgtaggatctgaaaaaaaaaatgtcgtcaaatggaactgacaactcaacttctaagaagcctccaagtccttctcctttgagattttccaagttttttcagcccaacatgagaattcttgttactgggggagctggattcattggctcccatttagtggataaattgatggagaatgaaaagaatgaggttattgtcgtcgataactactttaccggcacaaaggacaatctcaagaaatggatcggacatccgagatttgagctcattcgtcatgatgtcactgagccgttgctcattgaggttgatc

SEQ ID NO: 51507 - DNA, 460 bp, Gossypium hirsutum
  Clone ID: LIB3197-040-Q1-M1-G8
gagaaagaggggttacagttaaacccaaaaagaagcaaaaggaagaatggttggtgatggaaagttgttcactttggctcaagtctctgagcacaacacccccaaagattgttggctcatcatcaacggcaaggtttacgatgtggcaaaatttttggaagaccatcctggtggcgacgaagtgttattatcagcaacagggaaggatgccacagatgattttgaggatgttggacacagtgatagtgcacgagacatgatggatcaatactatgtcggagagatcgacatctcaactatccccaagaagacgacatataaacccccgaaccagccacactataatcaagacaagacatccgagttcatcatcaagctccttcagttcttagttccccttgccatcttgtgtttagcccgtggtattcatcactacaccaaatcgtcttaaaaataatcg

SEQ ID NO: 51508 - DNA, 445 bp, Gossypium hirsutum
  Clone ID: LIB3197-040-Q1-M1-G9
gttcaattctccccctcttgtatcttctctttcctttttttttttcaattcaaaacccagctccaggccaagccaagggttcaacctgcagttgggtctttaaggttgttccttggaataaagacggaacctgagaaggtgattggtggtgttagtgaggctgaaatggatggttcaaaaccagttatggaggaaacagaaactgagggtcaagtcccaatggaggccgagactggagctgctgaagttaaagaccaagttcaagttgaagaagatgtgagattggaggctgatcagctggttggtgacaacccagattcagtagcacaacaggccattgaagatactagcaaagctctcattgttgttggtgctcaaaatgaagaaaaaatgaagcctgaagagagtgttggtgttgaagacaaatctttagctgaaactgata

SEQ ID NO: 51509 - DNA, 454 bp, Gossypium hirsutum
  unsure (1)..(454): unsure at all n locations; Clone ID: LIB3197-040-Q1-M1-H1
gagagagagggaggaaaagatgcagatattcgtgaaaccgctaaccggcaggaccataactctcgaggtcgagagcagcgataccattgacaacgtcaaagccaagatccaagacanaggaaggaatcccaccggaccaacaacgtctcatcttcgccggaaaacagctcgaagatggccgtaccttggctgactacaacatccagaaagaatcaacacttcatcttgttctgaggttgagaggtggaattattgagccttctttgatggctttggctcgcaaatacaaccaagacaagatgatttgccgcaagtgttatgctcgtctgcatccaagagccgtgaactgccgcaagaagaagtgtggtcacagcaatcagttgaggccgaagaagaagatcaagtagatcccgactggtgttatcctgtctgctttaaaagaaaatgaatgtca

SEQ ID NO: 51510 - DNA, 393 bp, Gossypium hirsutum
  Clone ID: LIB3197-040-Q1-M1-H10
attcaacgagagaaaaacaaaaaaacactcccgaaatggcacgcaagaagatcagagagtacgattccaagagattgttgaaagaacatttcaataggctttccggtagagatttgccaatcaaatctgcacaaattacggaatcaactgatttcaatcagctagtagagaaggagccatggctttcgtcacagaaactggttgttaaacctgatatgttgttcggtaagcgtgggaagagtggtttggttggcttaaatctggattttgctcaagttattgctttcgtgaaagagcgccttggcaaagaggtggaaatgagtggatgcaagggacctgttacaactttcattgttgaacctttcatccctcacaatgaagagttctacctta

SEQ ID NO: 51511 - DNA, 407 bp, Gossypium hirsutum
  unsure (1)..(407): unsure at all n locations; Clone ID: LIB3197-040-Q1-M1-H11
cacttggctgctagattcaataagccagacaatgagatcatcgaccactacacatatgttattttgggagatggttgccagatggagggtattgcaaatgaagcttgttcacttgctgggcactggggacttggaaagcttatagctttctatgatgacaaccacatttccattgatggagacactgaaattgcgtttacagagagtgttgataagcgttttgagaatggaaacactggctacgatgaaattcgtgctgctattaaggaagcaaaggctgtcaaagacaagcccactctgatcaaggtgacaaccaccattggttatggatctncaaacaaggcaaactcatacagtgtacatggtagtgcattgggtgccaaggaaagtgacgctactaggaaaaa

SEQ ID NO: 51512 - DNA, 371 bp, Gossypium hirsutum
  Clone ID: LIB3197-040-Q1-M1-H12
gtgccttacttcatctcagaaaacaaagaaaagaaaaggtcatttcaaccatggcttccaattcgaagaagcccgctactgctgatgagaaatcggctttggaaacggagagcaaaagttcaaagtctgaaacatcctccactgagaagaaaacttcaacacctgagccttcaactgggggttcacagccagcacaagcaggggccttccctcccaacgctatgcctggtcctgggtttgtcccacccaatccatttgatttctcagccatgagtggccttcttaatgatccaagcatcaaggaactagctgagcagatagccaaagatccttcatttaatcaaatggcagagcagctcactaaaacgttt

SEQ ID NO: 51513 - DNA, 431 bp, Gossypium hirsutum
  Clone ID: LIB3197-040-Q1-M1-H2
gccaattgtttgagctagctagctcttactcaaatggcaaccaaaacgatgatgttgcaaatatttccacttttcttctttttgttcagtgtctgcaactccattttccttggtgctaatggagatgacaatggtggttggcaaactgcccatgccaccttctacggtggtgctgatgctaccggcacaatggggggagcttgtggttatggaaacctgtacagtcaagggtatggaacgagcacagcagctttgagcactgcacttttcaacaatggcttgagctgcggtgcctgctacgagctccggtgcaacaatgatcctcaatggtgcattagtcgaaccataaccgtgacagccaccaacttttgtccacctaactatgctttatctagtgacaatggcgggtggtgcaatcccccacgagaaca

SEQ ID NO: 51514 - DNA, 402 bp, Gossypium hirsutum
  Clone ID: LIB3197-040-Q1-M1-H3
ggcggacctccgggtattaatccttcatttttctcgcaaccgtgaaaaagggggctgcctttcacaaagctgttcagccggcttttggccaaaaaggaaatgcgtttatggatggtgggacttgatgctgctggtaaaaccaccattctttacaagctcaagtggggagagattgtcaccacaattccaaccattggtttcaatgtggaaactgtggaatacaagaacatcagctttactgtctgggatgttggtggccaggacaagattcgtccattgtggaggcattacttccaaaacacacaaggactcatttttgtggttgatagcaatgatcgtgatcgtgtggtcgaagccagggatgagttgcacaggatgttgaacgaggatgagttgagggat

SEQ ID NO: 51515 - DNA, 308 bp, Gossypium hirsutum
  Clone ID: LIB3197-040-Q1-M1-H4
cctcttcgaggtagctcaggtcttacccaactgggggcttggttaccacatggccaaaactcattggactgatgtttcatatcagatcaccaagatcaatctttataaggatggaaggcatggcaaggcatggagagtggtccacaaagacggtgctccagctgcagatgctccgaaaaaaatatgtggagttcacaaacgctgttagagatacattgcgtatctgtccaaacctagagataccgcaccgaccttgatgaaaccaacagaaaatgccccataggctgaatgtgaactagctcgatgca

SEQ ID NO: 51516 - DNA, 409 bp, Gossypium hirsutum
  unsure (1)..(409): unsure at all n locations; Clone ID: LIB3197-040-Q1-M1-H5
cccacgcgtncgcgaagaaatcctaaaatttcacttgaaatttcttctctttttttccccattttatttttcccaaaccatttctcccctaccccgattccctttattttttcccccaatttcctcaaatcagcagccctctgcatctccgtcggtagcccgctactatatctctgtcgacatctgctgtcggtagccctctctctctttgtttactatcactgtttttacttgtaattttcatattaataactatctcttcaaatgggttttcttttcaatttatatgccatcgggaatagacctctntagtcttcgaaaacactttccctgatcgttaattttactacagttgacagtgttctaagggttcagactcgagagtgtgctattggtatgcttgaaaaag

SEQ ID NO: 51517 - DNA, 305 bp, Gossypium hirsutum
  unsure (1)..(305): unsure at all n locations; Clone ID: LIB3197-040-Q1-M1-H6
gagttggcaaggatgattctcatgagaattcaagtgactgggatagccacactccttgtgttggtggcattaattttgggtcaaaaaggagctgaggccaggaaaggaaggatattggagtcgtttgagtacatagctatgagttgcagagcgcactctgcatcaataactgattttggaggaattggtgatgggaaaacatcaaatactaaagcatttcaagatgcagttaatcatctgagccagtatgcaaatgatggcggngctcagttatatgttcctgctggacaatggctgactgggag

SEQ ID NO: 51518 - DNA, 429 bp, Gossypium hirsutum
  Clone ID: LIB3197-040-Q1-M1-H7
gggggaaaattgccccagatggcaatgaagcgagaaagaggagcgagaaaggagactccaaatccctcaatgcctatttcaagcagaggaagtcacgaacagaagacttcaaatgccgggatcttgaaggagaaaatcagaaacaaataagagaatcgggaaatgaaaataagggcaagccgggaaaagggttcttcgcttgctatctgctaacctctctcagccctcgtcataaaggccacacctatatcggatttactgtgaacccactgcgtcgaataagacagcacaatggggaaatagggagtggtgcttggaggacaaagagccgacgcccgtgggaaatggttgtgtgcatatatggttttccaaccaatgtatctgctcttcagggccgatatataaaatatattttatattttatatata

SEQ ID NO: 51519 - DNA, 407 bp, Gossypium hirsutum
  Clone ID: LIB3197-040-Q1-M1-H8
cccacgcgtccgatagcattcatcatatcccccccccccccaaaaaaaaaaaaacccaacatcctttgaatactatcttcttctttcttgttttctgtttttgattcagtagtttttttattttttgttgctgtcaacacctgaataagctctcacaagtcaaaccagattttaaagaaatgtacccaagggtgaaagtcaaagaacaagaccaagatgatcaacaagttatcaaggattctgttttgtctttgaaggatgttctgtttctctctatgcttgattcttattttccagggaaaaaacatgaagatgatgtttctccgatgcccacagcaagaattccaaagtcttaccatgcaccagaagtagataaacattcagattctacatctgaagaagcagag

SEQ ID NO: 51520 - DNA, 338 bp, Gossypium hirsutum
  Clone ID: LIB3197-040-Q1-M1-H9
ttttcactcttttcagtcctacccaaaggcggcccctcaactctcctctcctttagcaatatctttccccttcactgtttcaactcaaagaaatggcggaggagaagaaggctcaatctgctggggtttggcctacggttaaaccttttgtcaatggtggtgcctctggtatgcttgctacctgtgtcatccaacccatcgatatggtcaaggtaagaatccaactgggtcaaggatcggcagcaactgttaccaagaacatgcttagggaggaaggtgttggtgccttttacaagggtctatcagcaggactgctcaggcaagctacatacactact

SEQ ID NO: 51521 - DNA, 378 bp, Gossypium hirsutum
  Clone ID: LIB3197-041-Q1-M1-A1
gtttcaaatatagtaaaaaaattcatacgcaatgagcactgctggtcagggtatgggttgcaaaactgcggtgacatgggaggcggggaagccactattgatagaagaagtggtagtggtaccaccccaaaagcatgaagtccgtattaagattgtcttcactgctttatgtcacactgatggatactactgggagtgtaagggttacactcctatagcttctcgtatacttggccatgaagcctcagggatcgatgacagtgggggtgagggtgttaatgatattgaaccagcagatcatgtgctccctatattcaccggagaaggcaaagaatgtagccacttgctgtcagaagaaatcaataacgtgagccaact

SEQ ID NO: 51522 - DNA, 442 bp, Gossypium hirsutum
  Clone ID: LIB3197-041-Q1-M1-A10
caaaaatggcagctccggcagtggagggagtagccgtgacggccctccgatcggtcctactccgagtccgacaggcagctgaacgggcgggtactcaacccgaacgggtccgggttgtggccgtttcgaagactaaacccgtgtcactcatccgccaaatttacgacgccggtcaccgctgtttcggtgaaaattatgtccaagaatttgttcaaaaagcccctcagctgcctgaggatattgagtggcattttattggacatttacagagcaacaaagttaaaacccttctcggtggagtgccaaatctagccttttttcagggtgttgataatgagaagatcgcaaaccatcttgaccgtgcagttttgagccttgagagaaaccctttgaagatttttgtacaagtaaatacaagtggagaaccatcaaaatctgggat

SEQ ID NO: 51523 - DNA, 412 bp, Gossypium hirsutum
  Clone ID: LIB3197-041-Q1-M1-A12
ggctttccccaaagatgatcctactaagccatgcagattaactgcgttcttgggttataaagctggaatgacccatattgtgagggaagttgaaaagcctggatcgaagcttcacaagaaggaaacttgcgaagcagttaccattatcgagacaccgcctatggttgttgttggagttgttggatatgtcaaaacaccgcgtggtcttcgtactttaggcactgtatgggctcagcatttgagtgaggaggtgaagcgaaggttctataagcactggtgcaagtctaagaagaaagctttcaccaagtattccaagaagtttgaatccgaagatggtaaaaaagatatccagtcacagcttgaaaaactgaagaaatattgcactgtgattcgtgttttggctcacactcag

SEQ ID NO: 51524 - DNA, 425 bp, Gossypium hirsutum
  Clone ID: LIB3197-041-Q1-M1-A3
tcggacacccgtacgatgggttcagcgggcgtaagagtcatctcgtatcgtgcgtggagttcgtgtgcgcatctgtctgcaaatgaaaaagcggtagacctagtgtcgcttgcgcttggtcgaactgataaccttatcatggccctatacgttgaatatcacgcgaggctagaggacaatacatgcgcggctggtgccgattatgcttcatcgcagcctgctacaggtaagaatggcaggacaggtcacagcagtgataagttcaatggcgctggatccatgcgccaggtttgagcaagtgatcgcggccgaggtcgatcgttagattcaatgaaggttggcctccgattatgacggcgcttgaagcgatggaccactcgatccggattgagctggaagtggctcagcacttgggtgaaaacatg

SEQ ID NO: 51525 - DNA, 436 bp, Gossypium hirsutum
  unsure (1)..(436): unsure at all n locations; Clone ID: LIB3197-041-Q1-M1-A4
agcagctgcaccacggagaagagagaaaaactgaaaaaggggaaaaaaagcgtcgtcgnttttgcttcttcttcttctttttcttcttccctctctctctttctcagaagctcctctttcgttcttttgttcactaagtattgtaaaagatggccgacggtgaggatattcaacccctcgtctgtgataatggaactggaatggtgaaggccggttttgctggtgatgatgctccaagggcagtttttcccagtattcgttggtcgtccccgacacactggtgttatggttgggatgggtcagaaggatgcctatgtaggagatgaagcacaatctaaaagaggtatccttactttgaaatatcctattgagcatggtattgtgagcaactgggatgatatggaaaagatctggcatcatacattctacaatgaac

SEQ ID NO: 51526 - DNA, 305 bp, Gossypium hirsutum
  Clone ID: LIB3197-041-Q1-M1-A5
gtcaattggaagggggaaacattacacggtgtcaagaatttaacatacagcgacatggacaagctgccaatatcaaatgttccagacggatcaaaaaggatgtgggagcatattgctatcacatatgtatctgcactttggacatcatatgcgctatatgatcaatacacaaaattatctggtatgaaggtacgatatctaacgtcagacaatatgccaacctgatcaatgcactggtatttagagaaatgctgctactgactctgatgaaacagcatgagcgcacatcgaacattgtgttcaag

SEQ ID NO: 51527 - DNA, 334 bp, Gossypium hirsutum
  Clone ID: LIB3197-041-Q1-M1-A6
ctttctatctctccttttttttttttttttgcttctgtaagtctccgattcagatctttcgtcaaatcaaataaacaatgcaaagcgcagcgtattctttgtcttctccctgttcgattccatctctgaagccgcgaaaattctgttcccgcgctggattccaacctattcgcgtttcatcttcttttgccgctcctgaacggcatgaacattccgtttctttgcctaatagatcgtggcggctctcttcctcctcgtccttgccgcttagggcctggaacttagttccttccgattcaaaaccggatcgctttgaagttagagccaaggcggc

SEQ ID NO: 51528 - DNA, 442 bp, Gossypium hirsutum
  Clone ID: LIB3197-041-Q1-M1-A7
gtcccttcttatctttgcagggagaatagagaaagaatatccaatggaaggctacaagaatgcttctaaacacatagcagggtaggctttccctttcggcacccatgctgtccctcttctcaacattatccgacaactatcaaacacttgccccgacaccatgttttccttccttagcacccaacaatcaaacaactcaacttttcccaaaaaccttgataaaattaagccttttaatgtatgggatggattacctgaggggtatagctttagggggaatcctcatgagcccgtcgattatttccttaaggcagttcctgggaattttataaaggctatagatgctgttgagtctgaaactcggaaaccaattgattgtttgataacagatgcattttatgcaattggggctgatatcgcggatgagctgaatattccttgg

SEQ ID NO: 51529 - DNA, 346 bp, Gossypium hirsutum
  Clone ID: LIB3197-041-Q1-M1-A8
cccacgcgtccggtgaaaatcaagaagaaaaaaaaacccttaaaatcaaaaccctaatcctattttttttttttcctttttgattgtagaaaacaaagcaagccctcaactggacaacatggggtctgaacagaatcaaggaaccagctttcccccgtcggagccgaagctttgcgctaacggttgcgggtttttcggaacggcggcgaacatgaacctctgctccaagtgttaccgggacctccgtgctggggaggagcaagcggcgaaggtgaaagctgccatggagaaatcccttagcgtcaaaccgaaagaagatgttgttgtggagacgtttaagcccgtt

SEQ ID NO: 51530 - DNA, 352 bp, Gossypium hirsutum
  Clone ID: LIB3197-041-Q1-M1-B1
atttgctgatatgtaggtaccgccacccatgcttgcaggaatgtacggttctggtggtcaggtgcgctttaataatgcaatgattactatgaagcatctgaattgtggtgtaatcaatgataaaagaccggatcatgttgttcatgtgggatataggaaaacatatactatcttgatttagatacacggtttaacttgtgaaaatatacagatagatagcattgatcaatacaacagataatacagattccatctgatgaaacggaaggtgctcaaattcatatttaccctctatgactaagaaagatggacacccattgggcactatgcgaagttgtgttaacaggaattc

SEQ ID NO: 51531 - DNA, 443 bp, Gossypium hirsutum
  Clone ID: LIB3197-041-Q1-M1-B11
ttcttttgcaacaaaatgggcgcatatgttttctaactttgggatataatgaaatctaagttcttgaaaatgattatttatgctttgaatatatcgggtgattgctctgataatcgatctgtcgcattctgtgttttggcactttgttgttaccattcttgagtcacccaatatatctagaacattaaaacccatagaaattcctcttgtggcttgatatcctacatgtgcctccgccgtaaacggagaggggacaccggagtgaagaacttacttggatgccaagacttttccccccatatctcttactatcagcctcgacgtagatctagaagactgttggttaaacgccgcatcaaaataaatagccacagttgctctctggtcatcttggttaggtcccttgtctgcttccaagattatccaaagtctgcaacaaaaga

SEQ ID NO: 51532 - DNA, 439 bp, Gossypium hirsutum
  Clone ID: LIB3197-041-Q1-M1-B12
gtcgtcgtcttaaatgtaagatttgtttgtttgttgttgttattgcttttaagtttggaaagagatgaatcctctgtgctgcattgctccggtttccatcgatcgtgaccgagctaacccggtggttaccaaatcgggtccgcaatgtcagctaagcatcgaaccttccgtcagaacagttaactattcgaaaccgagtttctcctcacaagtctcctcagtcaacgccgacactgacagatcctcgccgtcggtaatgaatcacacctccatggcaatattcgacgaacctattatcagagaggttaacgccgcccacggcgtcgcccggatcctgtacaaatgggtgaattatggaaagggatggaggtcgcggtggttcgttttggaagacggagttctctcgtttataagattcacggacctgataggatttgat

SEQ ID NO: 51533 - DNA, 230 bp, Gossypium hirsutum
  Clone ID: LIB3197-041-Q1-M1-B2
aagctgaccctgcggccggccgatcattcgacaacaccgacggattgctgactgttgatacttataggtcaattcacggcgctgtggttctttcattaactatgaacaaatcacatatttgatgacatctccatcttagacataaaatcgatctactgcgcctataaccatttgttttaacacctaaaatcctaataactatataggggactcactaggtcatatataag

SEQ ID NO: 51534 - DNA, 446 bp, Gossypium hirsutum
  Clone ID: LIB3197-041-Q1-M1-B3
ggttaggtcagccaattgtttgagctagctagctcttactcaaatggcaaccaaaacgatgatgttgcaaatattttcacttttcttctttttgttcagtatctgcaactccattttccttggtgctaatggagatgacaatggtggttggcaaactgcccatgccaccttctacggtggtgctgatgctaccggcacaatggggggagcttgtggttatggaaacctgtacagtcaagggtatggaacgagcacagcagctttgagcactgcacttttcaacaatggcttgagctgcggtgcctgctacgagctccggtgcaacaatgatcctcaatggtgcattagtcgaaccataaccgtgacagccaccaacttttgtccccctaactatgctttatctagtgacaatggcgggtggtgcaatcccccacgagaacactttg

SEQ ID NO: 51535 - DNA, 376 bp, Gossypium hirsutum
  Clone ID: LIB3197-041-Q1-M1-B4
gtccatttacctacaatcacaaatgctacctttttgccaatcaaaaacttagccggcatttcacgtcattcaatttcaggctccaaagcaggaaaaattctacttctgatgctaaggagttcgacgaatcggcatttgaagctgagaggttgagactggacgcaaaggctcgagaatcaatggcccagatttccaaaacaatgacggaaacgactgcagaagccgaagctgatcccaaagcttggaaatgggtcattcgtaaaaggatttgggatttaatggaggcgcagaatattgcacagaacccaagacccgttcatcatcggatcccaaacttcgtcggtgcctcatctgctgccaaaaaaatgagtgagct

SEQ ID NO: 51536 - DNA, 403 bp, Gossypium hirsutum
  Clone ID: LIB3197-041-Q1-M1-B5
gctcgtgccatttagtggtttaagggattttttcatttgtttcttcttacgctcgattacctcacgaaaagagaaaatgaccaagtgttacccaactgtgagcgaggaataccagaagtcagttgaaaaggctaagaggaagctcagaggtctcatcgctgagaagaactgtgctccactcatgctccgtctagcgtggcactcagctggaacttttgatgttaagaccaagacaggaggtccattcggaaccatgaagcatcctgctgagctcgcacatgctgctaacaacggccttgatatcgccgtcagacttctcgagccgatcaaggagcagttccctaacctcacctacgctgacttctatcagctcgctggtgtcgtcgccgttgagattactggt

SEQ ID NO: 51537 - DNA, 392 bp, Gossypium hirsutum
  Clone ID: LIB3197-041-Q1-M1-B6
gtcaaagttggctaaattcactttttgggctatgtgagtaccatagtaccactcatttgtttatctgctataatggctggaattacggtttcaagactgaggtcactttcaaattccttatattcatctttaaaactgtcatcactgccgttatacagatcgtacacgtcgcttacaagaatcgctgatcacagctatgttagagcatcttatgctcatttgaatagtttttatgacaaaagagaaactcagtctgcttcaatgtttatgaatactcctattaggggtggaagcatctgatcctttggctgatacctgtttccgcaaaaccaatcccgtgtctgtgttaccctcaacctcatcaacattgcgtttccggagtatttttcctt

SEQ ID NO: 51538 - DNA, 443 bp, Gossypium hirsutum
  Clone ID: LIB3197-041-Q1-M1-B7
gaaggctgattggcatgcatgtcttgataacaatgttggattcaagggttttgctgtgccaaaggaagagcaggataaagttgctaagttcacattccatggcctgcctgccgaacttagacatggaagtgttgtaattgcggctatcaccagctgtacaaacacatcaaaccctagtgtcatgcttggggctgggcttgttgctaagaaggcttatgaactaggtttggaggtcaagccatggattaaaacaagtcttgctcctggatctggagttgttacaaagtatttacttcagagtgggctgcaaaaatacttaaatcaacaaggttttaacattgttggttatggctgcacaacttgtatcggaaattctggagaacttgatgaatcagttgcttcagcaatttcggaaaatgatatcattgctgcagccgttcttt

SEQ ID NO: 51539 - DNA, 406 bp, Gossypium hirsutum
  unsure (1)..(406): unsure at all n locations; Clone ID: LIB3197-041-Q1-M1-B8
aattgctgttggtgaggcagtggcgtacgttctgtctggtatgtacggcagtgttggtcagctcggtgttggaaatgccattcttattattattcaactttgctttgctggaattattgtgatctgcctcgatgaacttctccaaaaggggtatggtttgggctctgggatctcccttttcatagccaccaatatctgtgaaaacataatctggaaagcctttagccctacaacaatcaacagcggtcgtggggctgaattcgaaggtgctgtcattgccatgttccatcttttaataaccaggacggacaaagttcgagcacttcgtgaagctttctaccgacagaatcttccaaacgttacaaatttactcgctacggntttgatcttccttattgttatctac

SEQ ID NO: 51540 - DNA, 444 bp, Gossypium hirsutum
  Clone ID: LIB3197-041-Q1-M1-B9
cccacgcgtccggatttgtacaagtttgatccatgggaattgccagcgaaggcaacgtttggtgaacaagaatggtacttttttagtccgagagacaggaagtatccgaatggagcgagaccgaacagggcggctacctcgggttactggaaggcaaccgggacggataagccggtgttgacttcgggagggactcaaaatgttggtgtgaagaaggcactggttttttatggagggaagccccctaaagggatcaaaaccaattggatcatgcatgaatataggcttgctgataataagactaacaacaaaccccctggatgtgacttgggcaacaagaaaaactcactaaggcttgatgattgggtgttatgtcgaatctacaagaaaaacaacgcgaatagacctctggaacatgataaagatgactccatggatgacatg

SEQ ID NO: 51541 - DNA, 441 bp, Gossypium hirsutum
  Clone ID: LIB3197-041-Q1-M1-C1
attgaggttcttcgtttaggccctgctgggattgttagtctctggaattcccttcattttgatcttgttcacatcttgtgctcttgtttcttcattatctttgtagccactgtttacttcatgtctaagcctagaagcatttaccttgtggattatgcatgctacaaacctcctgtcacttgtcgtgttccttttgctactttcatggagcactcgaggctgaacttgagcaacaaccctaagagcgttgaatttcagatgaggattctagaaaggtctggtcttggtgaagagacttgtttacctcctgctattcattatattcctccaactccaaccatggaagctgctagaggcgaggctgagattgttatattctcagctatggattctttgttcaagaaaacggggttaaaacctaaagacgttgatattcttatt

SEQ ID NO: 51542 - DNA, 437 bp, Gossypium hirsutum
  Clone ID: LIB3197-041-Q1-M1-C10
cccacgcgtccgattcttcttccttttcttgtttctctctttcttcccctttcagctattgagatcgcgtttcactcagttctggaaaaaagatggggattattgagaggattaaagaaatcgaagccgagatggctcgaacccagaaaaataaggccacagagtaccatcttggtcagctcaaagcaaagattgctaagctaaggacacaattactcgagccaccgaaaggttctagtggaggtggagacggttttgaagttacaaaatttggtcatggacgtgttgcactaataggatttccgagtgtggggaaatctacccttttgactatgttaactggaactcattcagaagctgcatcttatgagtttacaacacttacatgcattcctggtatcatacattacaatgatactaagattcaactgctcgat

SEQ ID NO: 51543 - DNA, 375 bp, Gossypium hirsutum
  Clone ID: LIB3197-041-Q1-M1-C11
ggcgagcgagccactgtaatcttttcctttcgttacaactttctcttcaggtctctttgagtccaaaccatggccaccggacagatgttttctcgaacaactcaagccttattctataactacaaacaacttcctattcaacgcatgcttgattgagatttcctttgcgggagggatacaccgtacgccgctggtatcattaatcctggggccgagggatttcagaaactcttctttggtcaagaggaaatagcgatcccagtgcattcaaccattgaggcagcatgcgctgcacatacaactgccgatggttttattaactttgcatcatatcgaagtgctgctgcttccgacatgtttgctatgaaacaacct

SEQ ID NO: 51544 - DNA, 445 bp, Gossypium hirsutum
  Clone ID: LIB3197-041-Q1-M1-C12
cggacgcgtgggctttttatttttttcagagcctccttcaccaacctccgctctgttcagcccgtgatcttttgatctttctccatggctaccatttccaagctcgctaaccccaacccagtcgcttctctttcattatctttcaaacccagatcttcttcatcgcttaaatgcttcgttgggttccctaccaggcctgctttcagctctaagctggtttcatcttctagcttgtcctcgataaacacccaccctttcaggggctccttggttgtcaggtgttctcttgctgatggaaacggtagttcagtgaagacgactactttgcatgatctgtatgaaaaagaagggcagagtccatggtatgacaacctttgcaggccagtgaccgatttgctgccactgattgcaagtggggttagaggtgtaactagcaacccagcga

SEQ ID NO: 51545 - DNA, 435 bp, Gossypium hirsutum
  Clone ID: LIB3197-041-Q1-M1-C2
ctttggaagcatggacttcatagctactatcctgtttctagctcttgtcatctcctccaccaaagctttggacccttgcggccctcagccagatgactcggaccttttggtcatcccaatctatggcaaatgttcaccattcaacccacccaaacctgactcatcgttcaacacagtcatgaacatggcatcaaaagacccagcaagggtcaagtacttgtcgagccttgtagcccaaaagaccactgcggttcccattgcttcaggccaacaagtcctaaacattggcaactatatcgtccgggtaaagattggcactccgggtcagctcatgttcatggtattggacactagcaatgatgtggcttgggtcccatgctccggctgcaacgggtgctcagccaccactttctcacccaacacttcttccaccta

SEQ ID NO: 51546 - DNA, 414 bp, Gossypium hirsutum
  Clone ID: LIB3197-041-Q1-M1-C3
attcattgcaaatcagtctgttacttaagagttagatacgggtatgtgcttgaaactggatatgattgaaggtcatatcccatatccaagtgtcagataccggtactcaagaaatataaagattcgaaataacatagataagctaaaaccctttgcaatttatacagatgagtgacttattcaagtaaaagatagaagccttaaacatatatatcctatgaagctcgaactcttcattttcctatagaatttttgtttgacatttttcgctatctattaacacaatataacaaattttccaaattcaaacaaatttaagtttcttttttgttttaaataataatgttgaattgaacccattgttttgctcaactaaaattacagcttaataaccataaattcttattttccagt

SEQ ID NO: 51547 - DNA, 412 bp, Gossypium hirsutum
  Clone ID: LIB3197-041-Q1-M1-C5
ctctctctgggtctcaaattccggggctccgtgcccctaatacgaaaccgagcaaaacccaactctgatttactcctaattggtactggccgggtattttccatcactttcctgggaaaaaaaagcataaaaggaaaaagtttcaggagaaatgtactcagctattcggtcgttaccgttgaatggaagtgtaggagattatcaagggtcgtttgatggaaccaacttgcctagcgatgcttgtttggttttaacaacggatcccaagcctcgactccgttggacagctgagctccatgaacgtttcgtcgatgctgttactcaacttggtggccctgacaaagcaaccccaaagactattatgagaacaatgggagtaaaaggccttaccctctatcacttaaaatcacac

SEQ ID NO: 51548 - DNA, 412 bp, Gossypium hirsutum
  Clone ID: LIB3197-041-Q1-M1-C6
ctattatctcgttttgggatgaattaagtgaataaagtttagttctctttgcgcgtgtcccgttctcttctccaatcctccaaaacttgaacttaaaaccccattttagttgatcccaaagttgacccctttttttgtttcagtatagtaatataccaagcctttgcttaaatggaggttaagctatggaacgacaagcgcgagagagaaatgtatgagaattttgcagagctgtatgccattatcaaggcaacagagaagcttgaaaaagcttatgtgagggatattatttcatcatctgaatatgagactgaatgccaaaagcttattgcccatttcaagaccttggcttcaacactcaaagatacggtccctagtattgaacgttttgcagatacatataaaatggact

SEQ ID NO: 51549 - DNA, 341 bp, Gossypium hirsutum
  unsure (1)..(341): unsure at all n locations; Clone ID: LIB3197-041-Q1-M1-C7
aacagttgaaaatatctctctcttcgcgtttcttctcttttcaacgcagggtgaaaggcggggaggccgtanacaatctctcttgcgctcttctcgtagaatggatcagattcaacatccaactgtcatgcagaaggtagctggccagctcctttcttctagcatttcccgagattttcaagggtatgatgggtctttcaggaggcctgccctataccaaggacattttgcatatgggaattattccaatgctggaatgcactatcctattggtccatcaacagctaccggcatttgtgttcaagcccctgctgagaaaggatttaccagctttgccattg

SEQ ID NO: 51550 - DNA, 360 bp, Gossypium hirsutum
  Clone ID: LIB3197-041-Q1-M1-C9
cggacgcgtgggttcccactcttcaattcctcatttcaagggagagagtgtatcagtgtttcttcccctcttttacttaatttctctccgccatggctctctccgtcgagaaaaccgccgccggccgtgagtacaaggtcaaagacatgtctcaggctgacttcggtcgtctcgagatcgagttagctgaggttgaaatgcctggtttaatggcttgtagaaccgagttcggccctgcccaacctttcaaaggagccaaaattactggttctcttcacatgaccatccaaaccgccgttcttattgaaacccttaccgccctcggagctgaagtccgttggtgctcttgcaacattttct

SEQ ID NO: 51551 - DNA, 429 bp, Gossypium hirsutum
  Clone ID: LIB3197-041-Q1-M1-D1
ggcggttctttggagcttaagaggaagaggcattctttcactcccaaaatgtcagatcttcaagcaccccttcgcccaaagaggaagaagggcttggtggactttttggtccagtttcgttgggtttttgttatattttttggccttcctttttcggctctgtattactttctcatatatcttggagatgtcagatccgagatgaagtcctacaagcagcgtcagaaggaacatgatgaaaatgttaagaaagtagtgaagcgtctcaaacagaggaatccaaaaaaggatggtcttgtatgcacagcccgcaaaccatggattgcggtggggatgcggaatgtagactataagagaactcgccattatgaagttgatttgtctgctttccgtaacattcttgaaattgatagagagagaatgattgca

SEQ ID NO: 51552 - DNA, 443 bp, Gossypium hirsutum
  Clone ID: LIB3197-041-Q1-M1-D10
ctcatttcaagggagagagtgtatcaggggtgcttcccctctttacttaatttctctccgccatggctctctccgtcgagaaaaccgccgccggccgtgagtacaaggtcaaagacatgtctcaggctgacttcggtcgtctcgagatcgagttagctgaggttgaaatgcctggtttaatggcttgtagaaccgagttcggccctgcccaacctttcaaaggagccaaaattactggttctcttcacatgaccatccaaaccgccgttcttattgaaacccttaccgccctcggagctgaagtccgttggtgttcttgcaacattttctctacccaagaccacgctgccgctgccatcgctcgtgactccgccgcttgtttcgcttggaaaggggagaccctccaagaatacttgggggtactgagagagcccttgattggg

SEQ ID NO: 51553 - DNA, 442 bp, Gossypium hirsutum
  Clone ID: LIB3197-041-Q1-M1-D11
tgctttgccgtctctttctcctttctagttttccttctccttttcttctacattttcccagaaaaaaaaacccaataagactttgtagtgatggttgaattgatgcatgtaacagcagcagtggtaatcattgttattgttttgatccttttggtagtgtttatacttaagtggtgtcttcataaagagagtactgaaggtaaagacatggttgctgatcaccactatgttttccgacgtggggtgtcggcaaagccattgtttagttggtctgatcatccatctctcatcacagatgcagttgaaaatggatggtctagatttggtttcacaccctacaacatatcatcatcaacaaggtcatcaagcttgttgggattatgtgcagctgttgattttctaagagggaatgatgttgaattaagttgggaagtatgtcaag

SEQ ID NO: 51554 - DNA, 450 bp, Gossypium hirsutum
  Clone ID: LIB3197-041-Q1-M1-D12
ctcactttagcttctccacaaaaccccaagccaaatctttagcggttgtagtcactactcctctgctctccacgttctctctcaaccagcaatgggtattaagggtttaacgaagcttctagcagacaatgcgccaaaggccatgaaggaacagaaattagagagctatttcggccgcaagattgccatcgacgccagcatgagcatttaccaatttctcattgtcgtgggtcgtatggggactgaaatgctcaccaatgaagccggtgaagttaccagtcatttgcaaggcatgtttactcggacaattcggcttcttgaagctgggcttaaacctgtctatgtttttgatgggcagcctccagatttgaaaaaacaagagcttgctaagcgttactcaaagagggcagatgctactgaggatttgcaagaagccatggagactggaaa

SEQ ID NO: 51555 - DNA, 392 bp, Gossypium hirsutum
  Clone ID: LIB3197-041-Q1-M1-D3
cgaaaaataatacttgtcgttggcttaataataaaaaatatcctctctttttttgtcaacatttcattttagtacaaaaatgctattaaggagttcgtcaataccgatacgtgactcatgggtctcacactcgaagaatttctctcctgcgccggagttattgcaccaaagttccctgacccgaaccgtttcatgttcgtgctccatttctgcagggtcgatcgacgattcgagttggaggatgatgaggacggtgtcggatacggatttgagggatctggtcgtcccccagatgaaaaccgctaagaataataacgtgctcttggatgggatctgtgtccaggaagaagaggtggaagagtgtgggataagcggtggtgggggacaaatct

SEQ ID NO: 51556 - DNA, 445 bp, Gossypium hirsutum
  Clone ID: LIB3197-041-Q1-M1-D4
gttcaaattcctttcttttttttatctattcgacatttttatgaataccagcaaagctttgtccacttgtatcaaaagtaaagtaatcgaatgaaggaaaaaaaaataacagcttacaatagcatgtctctatgtgacttcaatacatacaagaaaccaacctggtaattttcacaagacagggaattcattctcacctggaattggaaagtccctggattcccatttgtttttcatcatattgcttcaagctttttctcttttccatttttatcaatatacagaaacttataatacaagaattgaaggagaccatggccattaaagaggacatagagagaggtaacgacagtgttttcgaaagcgcagctgtatctcttttgcaagatgagaatgatatgggcggtaaggaagatggataccctgatcaaacaagcagcaaagc

SEQ ID NO: 51557 - DNA, 441 bp, Gossypium hirsutum
  unsure (1)..(441): unsure at all n locations; Clone ID: LIB3197-041-Q1-M1-D5
gcctgaaagcaggcacttacaaggggaagaaattcaatgctatttgccacttctttggctatcaagctcgtggatccttaccatcaaaatttgattgtgactatgcctatgttcttggacatatctgctatcatattcttgcagctggtctaaatggttatatggcaactataaccaacctaaagaatcctgtgaacaagtggcgttgtggtgctgcacctcttccagcaatgatgactgtgaagcgctggtctcaaaatcccaatgccgcgtcaattggaaaacctgctattcatccagctactgtagatttgaaaggcaaagcatatgagatgctgaaacaaaatgcaacaaggtttttgctggatgatatctacagaaatcctggacccctccagtttgatggtccangtgctgatgctaaggctgtgacattatgtg

SEQ ID NO: 51558 - DNA, 168 bp, Gossypium hirsutum
  Clone ID: LIB3197-041-Q1-M1-D6
ttggaagtctggtgaaacacctaggtcgtatttagacaagccattggtcgtatgttgctcgctcaaaggttaacaaccctatatgttggttctacattgattgattatgggcatatcgagccatggattgattttcaaccttggaaattgaagctaatattgccaaag

SEQ ID NO: 51559 - DNA, 350 bp, Gossypium hirsutum
  Clone ID: LIB3197-041-Q1-M1-D7
gaagaggccaaaatcatccacctaaaacacctgttcgagagaagcaacaaaatcacaaggtctctcctgttcatggggcagatgctgctgctgctgctgttggccatctcgaaaccgatactaaaatgatagatttaaatatgaagcctcatcgaatacatgggcaagcctcaaacaatcaggttagaactacttttaaactattttctatacctatataaacatgcttatctttttctttcactgcatttgaaacacatggtgtaattgttctttcaacatgtttaggggtaatatctgcaattatttattaaggagtgtgactaagaggctgtcttggttggaacttg

SEQ ID NO: 51560 - DNA, 367 bp, Gossypium hirsutum
  Clone ID: LIB3197-041-Q1-M1-D8
cctaaattgagagagacagagagagatatggggaaagacgaggaggagatgcgtggcgagatcgaggagcgactcatcaacgaagagtacaaaatttggaaaaagaacactcctttcctctacgatctcgtcattacccatgcccttgaatggccttctctcactgtcgaatggctccccgaccgtgacgaacctgctggcaaagattactccgttcaaaagatgatcttgggtacttacacctctgaaaacgaacccaattacctcatgcttgctcaagtccagctccctctccaagattccgagaacgacgctcgtcaatatgaccacgataggtctgacctcggtgggtttgggtgtgctagcg

SEQ ID NO: 51561 - DNA, 424 bp, Gossypium hirsutum
  Clone ID: LIB3197-041-Q1-M1-D9
gacttacaatccttcaaagggaaaagtatatgcactgctcaaggatcaagcgaagtcagatgacattctaaaagcagcattccatgcacatgtgctcttgcatttcattcattctgccgataatagtctatcatctagaagccagcatgaacatctcatgccagcagctactgattttgagcttcatattgctgaatcatgtaagatggtttcaacatcatatagacatttcaagaacaatgctgcagaacagggttggaggatgtcagactcgcttcttaatccgggtcgggctcgactgcattgatgggctaaatgggatgaacaagtttgaactctactgtttacccaaaattggttgttgagatccaatttccatacattgcacttatatacagcagcggaacgcgcatatacatgacac

SEQ ID NO: 51562 - DNA, 417 bp, Gossypium hirsutum
  Clone ID: LIB3197-041-Q1-M1-E1
tcagtttcaaacaagggcttgattgcaattgcagagaactgccctaatttgacctctttgagcatcgagtcttgccccaagattggtaacgaaggccttcaagctatcggaaagctttgccctaagttgcaggctgtctgcgtcaaggactgccttcttgttggggatcatggagtttcaagcctgttgtcgtcaacatcttctctcctttcaaaggttaaatttcagggtttgaatatcacagacttttctcttgctgagattggtcactatggcaagtcggtgacaaatctaatgcttagtggcctacaaaacgtgagcgagaagggattatgggtcatggggaatgctcaaggcttacaaaagttggtctctttgacgatcacatactgccggtgggtaacagatgtgagtctt

SEQ ID NO: 51563 - DNA, 412 bp, Gossypium hirsutum
  Clone ID: LIB3197-041-Q1-M1-E10
aaacaaaacccttttggaacagtaatcatctgcaatggttatggtgcctggctcaagtccgcaaaccgatccaagtctctcaaaacaaaaccccaggaaatgttgtctcaattcgccctttcttttttcagtaaatcccctttaaattcctcaaaaccccatgaacccctcaaattccagctccccctttccaatctctatgtcaagaattcaatgaaggcccctgttacttcttcttcatcaaattttgggttcaaggaattgttggaaactttcacggtggaagttcagaaagctgagaacaaacccctaaatgttcctttggttgctcctttcaccatagccacttctaggcttgataaagtggaaaacgtggcaatcaggatcgagttgaaaaatggatgtgttggtt

SEQ ID NO: 51564 - DNA, 427 bp, Gossypium hirsutum
  Clone ID: LIB3197-041-Q1-M1-E11
aaactaagggggagaaagagaaatgaagcattggggtctgattttgctcctttttttgttatttcaacaaggaaattttctcctgcgtgtcaaagctgatgacgggtttatcaaaactaaaggactgcagctaatgttgcatggaagtcctttctatgcaaatgggttcaatgcttattggctcatgtacatggccgctgattcatctcagagaagcaaagtctcatctgcgtttcaacaagctaaagagcacggtctcaccatagccagaacttgggctttcagtgatggtggagacaggcctcttcagtactcgcctggctcctacaatgaacaaatgttccagggattggattttgtagtatctgaggccaagagatatgggattaagctggttttaagcttcgcgaataactatgatcaattt

SEQ ID NO: 51565 - DNA, 452 bp, Gossypium hirsutum
  Clone ID: LIB3197-041-Q1-M1-E12
cttccactttgtatgctattgcttgtgttcttgaaaatgttcctttcatcaatggcagcccacaaaacacctttgttccagggttgattgatttggctattcaaaggaactgtctgattggaggagatgacttcaagagtggccagaccaagatgaaatctgtcctcgtggatttccttgttggggctggtatcaagccaacatcgatagtgagttacaaccatctgggaaataatgatggcatgaatctgtcagcaccccaaaccttccgttccaaggagatctcaaagagcaatgttgttgatgacatggtttcaagcaatggaatcctctatgagcctggtgaacatcctgatcatgttgtggtcatcaagtatgtgccgtatgtgggagacagcaagagagccatggatgagtacacatcagagatattcatgggaggcaagaacacc

SEQ ID NO: 51566 - DNA, 438 bp, Gossypium hirsutum
  Clone ID: LIB3197-041-Q1-M1-E2
aacagaaaacgggttaagccagagtctgagcggcccctcttatcacaccctgtctccgaccttgcgatagccgagcgatcaccaccaacccttctccaagaatgttgcgtcgagcatcgatgctattggcctgtcgatccattttggcagcaagggctcgacccttctccactgatctgccagcggcaccctctgcggatgccacattcacggaggcgtggactaaagtgatccccaacatggaccctcctaaaactcctctctctttcatgcaacctcgtcctcccactccttcctccattacttccaagcttactgtcaatttcggccttccttatgcttctgagttggccaccaaagaggttgacatggttatagtaccagccacaactgggcagatgggttgtcttccaggacatgtagcaacaattgcagaac

SEQ ID NO: 51567 - DNA, 375 bp, Gossypium hirsutum
  unsure (1)..(375): unsure at all n locations; Clone ID: LIB3197-041-Q1-M1-E3
cggacgcgtggggcaagggcggtcttgctacaggacagggaacggatggttcacatgttaaggaggccatggacttggcaacttcatttgcttcaatgaagttaaaatgaaaaaaatttctgcaactttcgtccctgacatggaagaagcattgatgctactaaatttcatcgatacattaaagtgaaatagaaaacatttagtttgtgtggaaatgctgcaattgccgaagaaaaatctatcactgtaatatactactttatttttcacttacgaacgtgtttcggcatatagaagaaaaattatgctattgatacccttcgaacatctccacgcttctttatttagcagtgaaaatggattataagaatcana

SEQ ID NO: 51568 - DNA, 452 bp, Gossypium hirsutum
  Clone ID: LIB3197-041-Q1-M1-E4
ttaaattcctacagataatcgattaactcaggcaaagtaggatttggctgtggattggcttgggcggcctcatcagtcagcagggtagaggacgccaaagcgcaaccatccccaaacccacctatttcctgaaaaaccctaaacgccttcacacatttccatggcgaaaccataatattattgagaaacaaagttagcccggattttgtttacgaaaaaaagtgaacccagataataaaaaaggagaaaagaatttgttttttagctttttttggttgtcgggtttttgggagatgtcggagatcgaggtggttgaagaagttttgccattgaagcaatccggtgacgttgtagcgaatggaaatggatacaggggagggaataatggggttaataggtttctcatgatgagaacttgaggaacgatgtctacaccgctgctacttatgggg

SEQ ID NO: 51569 - DNA, 438 bp, Gossypium hirsutum
  Clone ID: LIB3197-041-Q1-M1-E5
ttctcttgattcaaacactagggtttgatcgataattttattcatattttcctttacttcgattgcaattattcagatcttcaaaatccgagttattttctttcatttaatctgaaattggttggattttccttttaattttgaaatttaatctaagaaagaaggggaaaaaatgccggcagtttacggatccagattgacaactttcgaggattcagagaaagagagcgaatacggttatgttcgtaaggtgtctggaccagtcgtcgttgctgatggaatggctggtgctgctatgtatgaattagtccgtgttggacatgataatctaattggtgaaattattcggttggaaggagactctgctacaatccaagtttatgaagaaacagctggcctgatggttaatgatccagttctgcggacacacaagcccct

SEQ ID NO: 51570 - DNA, 407 bp, Gossypium hirsutum
  Clone ID: LIB3197-041-Q1-M1-E6
agtgagtgccgcagcttctctctactctgtaatggcgaagtcaaagaatcacacggctcacaaccaatcttacaaggctcacaagaatggaatcaagaaacccaagaggcaccgccacacttccaccaaagggatggatcctaagttcttgaggaaccaaaggtatgcaaggaaacacaacaagaagaatggagaatcagccaatgaagaagagtaggcttttagtggggtaaaagaaaattctagcctgggttagggttttctaattatggttgttttgtttgtttcaatggaaattagggttttgtttttttcaacattagcactattttgatgattatctttgttataaaatatttgaagctttgagcttatcaatattgagaacatgtttcgagtttatctac

SEQ ID NO: 51571 - DNA, 420 bp, Gossypium hirsutum
  Clone ID: LIB3197-041-Q1-M1-E7
attaaaaaccggataaaccaccttttcattgttcactttcatttttccctttaaataataaaacccagacaagggacagccaacggtaccttccaaagaaatcgaaattttgacttatgattctcatatacatacccccagcccccaatatctcccacaaccttccatttacgtcttaactgttgaatgatcaatttccatttattcttttggtttttgaatttttgagtttttagggcgaaaaaaacaatggcgaatttgcaactggaaagagagactagcattgggatgcaagtggaagatctatgggatgttcaagaatcaaagcttaatcctacgcagaaacttaacgcttgctttgaaaacatccctgtctctgctttccctcatactcctcaagggatcgagataaaatcggat

SEQ ID NO: 51572 - DNA, 408 bp, Gossypium hirsutum
  Clone ID: LIB3197-041-Q1-M1-F1
ctaaatctctgcatcatcatcgatcatgtctcttttattctccctactgctgttcttagccatgactggccattcaagtgctacttattgcttatgtaaagatgggttaggggatcaagctcttcaaaaggccctcgattatgcttgtggagctggagctgattgttctgcaattctacaaaaaggtggttgctataaccccaacactgtgaaagatcactgcaactatgctgtcaatagttatttccaaaagaaaggtcaagcacaaggaagctgtgatttttcaggcactgctactgttagtgccaatcctccttcaaatattgcttctacttgcagctttccctctagtagcacaggcatgaccgcaccaactgggacaacaaccgggacaccaaccaccactgg

SEQ ID NO: 51573 - DNA, 453 bp, Gossypium hirsutum
  Clone ID: LIB3197-041-Q1-M1-F10
aaagcattagcaaccatagccatggcttcctcaccaaaactcttctctatgtctatcctcttcctttttgccctcttctccatgcaaatccatgctagagagtacttcagcaaattcccaagagttaacatcaatgagaaagagacaacaaccagagagcaaaagcacgagaccttcgttccccagaccacccaaaagccagaagaacaagagccaaggttcattcctgaaacccaaaatggttatggcctttacggccacgagtcaggctcaagccggcccagtttcaccaccaaagaaacctatgaaccctatgtcacccctgttagattccaccctgatgagccctataacagcatccccgaatcctccaacaataaagacacttactactacaacaagaatgcctacgagtccactaagcagcaaaacttgggcgaggccattttcacc

SEQ ID NO: 51574 - DNA, 421 bp, Gossypium hirsutum
  unsure (1)..(421): unsure at all n locations; Clone ID: LIB3197-041-Q1-M1-F11
ctgaacatgttgctctcgagattgcaaaccgcgtanaagctgcaatatatgtatggcgtcnaagatctcattcgaagcctcctattaacccaaaccgatccactgcaaaatcatcatgggaaatggtgaaggaccttatggttgatggagacaagagagaatttctagcagaaagagctgaaactctcttgctttgcttgaagcaacgatttccgggtttgactcaaactacattagataccagcaaaatccaatgcaacaaggatgttggaaagtccattcttgaaagctattcaagagttttggaaagcattgcatacaacatcgttgcacgtattgacgatttgctatatgtagacgacttaacgaagcattctgacaagttatcatcagttcctacggttagtgtaatcgcacacaa

SEQ ID NO: 51575 - DNA, 376 bp, Gossypium hirsutum
  Clone ID: LIB3197-041-Q1-M1-F12
caaagaaccagttcctcaatctctctaatcctcgctttcttccccatcaaacacaccttcgattttcccaagcaggttgtagaagatggcagaaggtgaggatattcagccacttgtttgtgacaatggaactggaatggttaaggctggatttgctggggatgatgctccccgagccgtattccctagcatcgtcggtcggccacgtcacaccggtgtgatggttggcatgggccagaaagatgcatatgttggtgatgaagctcaatcaaagagaggtattttgactttgaaataccctattgagcatggtattgtgagcaactgggatgatatggaaaagatttggcatcataccttttataacgagcttcgt

SEQ ID NO: 51576 - DNA, 397 bp, Gossypium hirsutum
  Clone ID: LIB3197-041-Q1-M1-F2
tctcacgatactttccccattctcaatcgtcatctactcctcacctcacctttctcctccgcagcatggccacttccgccgctgccggtcccattaacccatccaacactcgccttggatggattgggactggcgtcatgggtcgatccatgtgtgctcatctgatcaacgctggctactctctcaccgtcttcaaccgtaccctttccaaagcccaacccctcgttgacatgggtgcccgcctagcccaaacacctcacgacctcgctgcccaatccgatgtcgttttctccatcgtcggttacccttccgacgtcctccaggtcctactcgatccctttaacggagccctctctggcctccgtcccggcggcatactcgttgacatgacaacatc

SEQ ID NO: 51577 - DNA, 441 bp, Gossypium hirsutum
  Clone ID: LIB3197-041-Q1-M1-F3
ggaagattgagcaatgtagcatcaaagatcatgggcggaaacggcatcgtttcacgctccgctgcctcctctctccgtctccgttccggcatgggtctccctgttggcaaacatattgtgcccgacaagcctcttcctgtaaatgacgagctaatttgggacaatggaactgccttcccagaaccttgcatagatcgaatcgctgatactgtcggaaagtatgaggcattggcttggatgtgtggtggtttgagcttctttgcatcgttgggattcttagcttggtggaatgataaagcctctaagattccatttgcacctaaagtatatccatatgacaacctgcgagtggagcttggtggagaaccataggtagatctgtatgagcaattgtacggttcttggtgtcacttgtctccccatgtgtttcattttacttct

SEQ ID NO: 51578 - DNA, 450 bp, Gossypium hirsutum
  Clone ID: LIB3197-041-Q1-M1-F4
gttggaacttctcactggacgtaagccatttgacagcacaaggcctagactggagcaatctttggttcgatgggcaacacctcaactccacgatatcgatgctctatccaagatggttgatccggcacttaaagggctttaccccgttaaatctctctcacgttttgccgatgtgatcgctctttgtgtccagccggagcccgagtttcggccacctatgtcagaagtggttgaagcattggttcgactagtgcagcgagctaacatgagtaagagaacaacagggacagaccaaggtgcatctccacgaactggaaaccccgatgatacacacgactacatgtcttaaatggttgcacaattcttgcttgattgttttggtgacgaggactctgaaattgtaatcatgtttgaatgggtttttttttattgtaaaataattatacatcc

SEQ ID NO: 51579 - DNA, 402 bp, Gossypium hirsutum
  Clone ID: LIB3197-041-Q1-M1-F5
cccacgcgtccgctcactgcctctctattataaaaaaagaaagcgaagatttagacttttatcatagtgttgaagtaattgaaggggaaaaaatggcaatggtgaatgtaataagcgttttgatctttatctcttcaatgtggatgatgggtgaagctagaatcccaggagtttactctggtggagcatggcaaaatgcccatgccacgttctacggcggtgctgatgcttcgggcaccatgggcggagcttgtggctatgggaacttgtacggccaagggtacggagtcagcacggcggcactgagcacggcattgttcaacaacgggttaagctgcggtgcttgcttcgagataaagtgtgccagtgacccaaagtggtgtcattcggggagcccatcca

SEQ ID NO: 51580 - DNA, 404 bp, Gossypium hirsutum
  Clone ID: LIB3197-041-Q1-M1-F6
cggacgcgtgggcaacctctctgataaaacaaagctgccattttacctcacacaggaagaaaataaaaacttaagcaaccaagcaagaaagaaagagcgatgaggcagggagcagcagcaaccaattaagatgatgaataggaatctaagggaatcgctggtgagcggcggagggaggaataacagtaataacatttcgcaggcctcccttcatcaccgccgtggcaaaatttttaacgctggattgttccccagggattcagacgagaatttggatcttttctcaaagagttgccgcagcctctccgtcgcctcctccgatgtatcagtaaaacagggaagaacatcacatggatcagatgatctactttcttcgacagatggaggaaagcatgattatgact

SEQ ID NO: 51581 - DNA, 437 bp, Gossypium hirsutum
  Clone ID: LIB3197-041-Q1-M1-F7
gtttcaatatcaaagcaaaaatgggttcttcttgtaatgttgtttcaatggccttactggcttgtttggtgttgaactccttggtttttgttgcccacggtggtgacttttaccaggatttcgacctaacatggggtgacagaagaggcaagattttcaatggtggcaagctcttgtctttgtctttagacagggtttcagggtctggttttcaatctaagaaagagtatttgtttggaaggatcgatatgcaactcaagcttgttgctggcaactcagctggcactgtcactgcttattatctgtcatcttaagggccaacccatgattgagatagactttgaattcttagggaatctgagcggtgacccttacattttacacaccaatgtctttacacaaggcaaaggcaacagagaacaacagttctatctttg

SEQ ID NO: 51582 - DNA, 372 bp, Gossypium hirsutum
  Clone ID: LIB3197-041-Q1-M1-F8
gaagggatcaacaactccagacaccagaaaaaagtaacaaatactctcacttttttcccttttcatttcgacgggactaactctaaattacaggattttattgttggaactgaagttttaaggtgatggcgaggatcaaaccacaagctttgctacaacagagcaaaaggaagaaaggcccagctcgaataagtcttacaacaattataatgttgactttgattgtcgttttgattctgttttttgtgtatgccacctacagacactggactcaaaagtcaagaattcatattgaaaacaaggaatcagttattgagggtgacaactctttcatggattcaaagaaatctgatcttccaggatatgctattt

SEQ ID NO: 51583 - DNA, 391 bp, Gossypium hirsutum
  Clone ID: LIB3197-041-Q1-M1-G1
gtcattcacaagcttgtactgtctgtaggtttgcaattcattttatgggaaaatcggtgcccagcgcaaccaatcttgatcatttggtaaaggttaccgtcgctcgccaccatctgaacacaactgggaaaaacccaaaacccactactctgaaccggcggattatatgtgaagacaacaaaccctattccaagaagaagatggagagctccagtgccagtcaacgcctcccactttgcgaaatcgtctccgattgcgttaagcgttggttcaaagatagtctcaaggaagccaaatccggggacgttaacatgcaggttcttgtcggtcaaatgtattataccggctatggagtttcccgagatgcccaaaagggaagaatttggatgac

SEQ ID NO: 51584 - DNA, 375 bp, Gossypium hirsutum
  Clone ID: LIB3197-041-Q1-M1-G10
gactcaccatatgttgatggtgttgctggaggacctccttgtgcctaaaaattatttgatgcaccttttcctattgttaataaaaggcgttatgggcattaagtgcccaaggacgtaaattttataagttatgtaaaaggaaaagttacatgtatggtggatgacattagtgacactgatggaacaataccaaaaggtgcatctcttttatatcaagaggggtctaggaaagtgtatgcgtgcaatacacatgctgatcataggactactgcaataaaaagattgtgaagtggtcttgttcaaaatgtgatcatatcggacacaataccagtgttatagcatgactatgtatctaaccagactgatcgcattgag

SEQ ID NO: 51585 - DNA, 447 bp, Gossypium hirsutum
  unsure (1)..(447): unsure at all n locations; Clone ID: LIB3197-041-Q1-M1-G11
caatgctcgaattaatccactaccagtagccccatgagcgactccaatatctcttcctcttcctcttcatcttcctccgattctgcttccatcgctaccgtcgatcagaatgtaaggaggaatgggagaatgatagatgatggcgacacgttttctccaaaggtgcgtcgttggcgtgatgttttctggttagcaatattcatgcttcatttaattgcgttgggatttgtgctcgtgcttcttggactcaataggtttaagaaatcagataggctaaacatcgatagatatacgaatcgagtttgggagcataataatggattgacggagaattattggcccaattatgctgttgccggtggggttggggccgcccttggatggatntgggtgtttttgcttgggtctcattctaacctaatgatgaanggttcagttcacattttg

SEQ ID NO: 51586 - DNA, 457 bp, Gossypium hirsutum
  Clone ID: LIB3197-041-Q1-M1-G12
tccattatgagtactgctggtcaagtcatccgttgcaaagctgcggtagcatgggagtcggggaagccactgtcaatagaggaagtggaagtggcaccaccgcagaaggatgaagtccgtattaagatactcttcacttctttatgtcacaccgatgtctacttctgggatgctaagggacaaaaccctctgtttcctcgcatactaggtcatgaagctggagggattgtggagagtgtaggtgagggggtgactgatctaaagccaggtgatcatgttctccccatcttcacgggggaatgcaaggagtgtccccattgcttgtcagaagaaagtaacatgtgtgatctcctccgaatcaacactgataggggtgaaatgattaatgatggaaaatccaggttttccatcaatgggaagcctatctaccacttcctaggcacctctactttcagtg

SEQ ID NO: 51587 - DNA, 425 bp, Gossypium hirsutum
  Clone ID: LIB3197-041-Q1-M1-G2
gcttgcggcaattggctctctctgtgaattgaagatgttacagttggataattctgatatatccgatgtaggaatagcatacttgcaacatggcattattagctcattggtttcgttatctgttaggggatgcaagaaacttacagataaatgtatctctgttctatttgatggctcttctaaactggagttgcaagagctggacctatctaatcttcctaatctctccgacaatggagttttagctcttgcaaaaagtcgggttccaatttcagaactccgaatgcgacaatgtccactcataggtgacacttcgatcatggcactagcctcaatgcaggctgatgacgatagaggacatggcagtaatctgcgattgttggatctttacaattgtggtggcattacacaactttcattccgat

SEQ ID NO: 51588 - DNA, 427 bp, Gossypium hirsutum
  Clone ID: LIB3197-041-Q1-M1-G3
cgcgtccgcgcagatccgaggagtttgggaaaccctatctctgtgtaatatcaaccggggaggctctcaaaaaactaccctttcttccccccccctctctctctctcactttctctcattctctttctttccagcctttctacactctttttttccccatcgctcctactgttttcatctgcttcaagtcatggcaggtttggcaccggaaggatcccaatttgatgctcgccaatatgatcagaaaatgactgagttgctccaaactgatggagatgattttttcacgagttatgatgaagtttatgacagttttgatgcaatgggacttcaagagaatcttctgaggggtatctatgcgtatggttttgagaagccttctgcaattcaacaacgaggtattgttcccatttgcaagggtcttgat

SEQ ID NO: 51589 - DNA, 244 bp, Gossypium hirsutum
  Clone ID: LIB3197-041-Q1-M1-G4
ccacgcgtccgcgaagaagtgttcaaaaagttcgatgcgaatggagacggtaagatctccgcctccgaactgggttccattatgaaatcactcgggtcaacacccctccgatgaagaactccacaacatgatcaaagaattcgacgccgacggtgatgggttcataaatttcaacgagttcatcgagttgaacaccaaaggagtcgactcggaagaggttttggagaacttgaaggacgctttt

SEQ ID NO: 51590 - DNA, 409 bp, Gossypium hirsutum
  unsure (1)..(409): unsure at all n locations; Clone ID: LIB3197-041-Q1-M1-G5
cgaaactcagttagtttccccacctgttttctcgggtttccccactgaaccttcaactgcaccatttacacctcctcccgagtcagttcacttgactacaccatcctcgcctgaggtgccatttgcccagttccttggccccaacctccagtatggagagcagcgattcccattatcccactatgaatttcagtcttatcatcttcaacctgggagccctgtaggccaattgatctccccaagctcaggaatctccggttctggcacctcatctcctttcctcgatggtgattatactactggtctacgctttcccgagttccaactggtttacccttccaagctcttgaaccttgataagctttccaaccgtgaatggngatcatatcatggttctggtcctttaacc

SEQ ID NO: 51591 - DNA, 410 bp, Gossypium hirsutum
  Clone ID: LIB3197-041-Q1-M1-G6
gtgcaccattagctccttctaagccagagccaaagcagcagagaagaggaaaggaagatagaaaaatgggcgcaacagccaccggcaaatctctccatttttgctcttcacaggaccccctttcatttctctccctaacaaagacaaaatcaaaagcagaaaccctaaacctcaacttcagattctccaaacccccattaacccccaattctcgtcgccttcgtctttccattagagcttcttcaccctcttccaccgccctcaatgacccgcctcttccctctctcagcaattgcgatcttcaacttcgagttcgaatcctctctgaatcactcccctacattcagaaatttaagggaaaaaccattgtcgtcaaatacggaggcgccgccatgaaatctgcggagctc

SEQ ID NO: 51592 - DNA, 416 bp, Gossypium hirsutum
  Clone ID: LIB3197-041-Q1-M1-G7
gaaaaaaaaaggggttccaagagaaaaggagaagaaatggcctcaaagcttcttcgtcaaaccctaaccaaaaccaacagaaccgccgctatacgctgcttcttcaccgcggcttctgtcgcttccccttccgagtatgagtacccaacaggaatcaccatgaaaggtgtgaaaatttcgggtcgtccgctttacctcgacatgcaagcgactacccccgtggatcctagggttttagattcgatgcttcctttttacctctctcgttacgggaaccctcactcccgtactcacctctatggttgggaatctgaaaccgccgtcgaaacagcccgcgcacaagtcgcggcactcatcggggcttccccgaaagaagtcgtcttcacctccggcgccaccgaatcgaacaacatctt

SEQ ID NO: 51593 - DNA, 416 bp, Gossypium hirsutum
  Clone ID: LIB3197-041-Q1-M1-G8
tgaacttgttttaagttttctgggggcattggtcaatatatttggggtaaatgcatgaaaccacgatatcaaagattggtttagctgcatatattttactttatcattcatcgatcatattagtcagcattatctgtgattattcctcataattggcctttcttcagaggaattaattactgatgtttgttaccaaaaatctttatctaatgatttttaaattgatactcacgataagcgattacaaattttttgataaagttaaacaagaataatcctattagtgtgaaaatttatgagtattctcctaatcaaattggtcaggggctcttaaaaaaaacatcggtgactattactaatttagtcatgaccagttataattagcttttttttttacctaaaagagaatgggttcc

SEQ ID NO: 51594 - DNA, 371 bp, Gossypium hirsutum
  Clone ID: LIB3197-041-Q1-M1-G9
caacaatgtttcgatcagtagctcgatcggccgccggaaagcacctcctccgccgaggatatgccactgaatctgttcccgatcggaaggtcgcggttttgggcgctgccggagggattggccagcccttggctctcctcatgaagcttaaccctcttgtttctcaactgactctctatgatatcgctaacactcccggcgttgcagctgatgtcagccacgtcaacaccagatctaaggttgctggatatgttggtgaagatcaattgaagcaagctttggagggatgtgatgttgtcatcattcctgctggggtgccaagaaagcctggtatgactcgcgacgatcttttcaacatcaatgctggaatc

SEQ ID NO: 51595 - DNA, 423 bp, Gossypium hirsutum
  Clone ID: LIB3197-041-Q1-M1-H1
cagtcttccaatgtctccccatctaccttttgggtgcaaaatctgaccaacaataacaccaccaaccactcatcgttatcttgtactcccaggattaatcctgtaatagccaaggcactgcgtactgaagcagctgccacagcacagcccataaaaatggtgaaagctatcagggttcatcaacttggtggacctcacgtccttaaatgggaggatgtggaacttggggaacccaaagagggtgagatacgtattaaaaacaaagctattggactgaatttcatcgatatctattttcggaaaggagtttataaggctgctaccatgcccttcactccaggtatggaagcctgtggagaagtgactgctgggggaccctgactgactggcaagaaagttggagatatcgtagcttatgctggt

SEQ ID NO: 51596 - DNA, 441 bp, Gossypium hirsutum
  Clone ID: LIB3197-041-Q1-M1-H10
gaaagatgatggaaaggggttttattgttttggccttgacggtggttttcgccgcgacggtggttacggcggctgacgagagtgggttagcgaatgagtgcagcaaagatttccagagcgtgatgacttgcttaagctttgctcaaggaaaagcagcgtcgccgtcgaaggagtgttgtaattcagtggcggggattaaagagaataaacccaaatgtttgtgttatattttgcaacaaacacaaacttccggtgctcaaaatctcaaaagcttaggtgttcaagaagataagctgtttcagttaccgtcggcttgtcaattgaagaacgctagcgtcagtgattgcccaaagcttcttgggttatctccgagctcaccagacgccgccatcttcaccaactcctcctctaaagcaacgacacccagtacttcaacaacca

SEQ ID NO: 51597 - DNA, 350 bp, Gossypium hirsutum
  Clone ID: LIB3197-041-Q1-M1-H11
ctaaaaaatatgaaggaccacgaaccgcagaggcccttgctgagtttgtcaacactgaaggagggaccaatgtgaagatagccacattaccatccagtgttgtagtgctaaatgctgataattttgatgaggttgtccttgatgagacgaaagatgtgttggttgagttttatgcaccttggtgtgggcattgcaaaaaccttgctcctacctatgaaaaggtagcattggcattcaaaatggaagaagacgtagttatagctaatctagatgctgacaagcacaaggatctagctgaaaagtatggagttagtgggtatccaacactgaaattcttcccaaaaaacaac

SEQ ID NO: 51598 - DNA, 218 bp, Gossypium hirsutum
  Clone ID: LIB3197-041-Q1-M1-H12
cggacgcgtggggtactcactcaacattcccatttccaatctccagctcccaaggtaaatatgccgatcagaaacatagcagttggccggcccgaagaggcgactcaccccgatgctctcaaggcagctttggctgagttcatctcaaccttgatcttcgttttcgctggatcgggctcaggaatggcttttaacaagttgaccgacaacggagcaac

SEQ ID NO: 51599 - DNA, 436 bp, Gossypium hirsutum
  Clone ID: LIB3197-041-Q1-M1-H2
gttttgtgatttcctcactgggtcttttttagcatatgggtcttaatgtgaatttttgatccaaaggtgatatttttccgttctttcagttggaaaaatcagtttttgggtgatgaaattgaaggggaaggtaactaggattgctgctggaggtaaccgtgcatccgtgattgggggtaactaatgaatttgtattctctaatctttgtaacaattttgcgttcttttgatggcctcaaaatctagtgtcatacattcccctgaaaagctgaggaaaccatttggtagcgaaactggcgaagggaattcttgtcggctatctcctatacaaatcacaaagacaagtgatttagcgccagttactccaaggatagtgcctaagaaacaaaattctgttgtaatcacggagggtatgcagccatcaaaacctcataaa

SEQ ID NO: 51600 - DNA, 436 bp, Gossypium hirsutum
  Clone ID: LIB3197-041-Q1-M1-H3
caaagctaaagtgtcatttgaaaatcactcgtcctggtattaacggtacagcgtttcgattttcatagagaaacctcgaaacttctacgtagtgagaggaaagtttgagtacgtgcgatggctcgctcgtggagagcaagcggctctttggtggctctagctatagtcttgtccggatgcttctttgcaatctcaattgccaaggaggaagccgcgaaattgggaacagtcatcggaattgatcttggtacaacttattcttgtgttggtgtgtacaaaaacggtcatgttgaaattatagccaatgaccaaggtaaccgtattactccatcgtgggtggctttcactgacagcgagaggctcatcggtgaggctgcaaagaatcaagcagctgttaacgctgaaagaaccatctttgacgtcaagagacttattg

SEQ ID NO: 51601 - DNA, 138 bp, Gossypium hirsutum
  Clone ID: LIB3197-041-Q1-M1-H4
gtgatgataagctaaattggcgtccacgtttaacggatatcaagctggaccagactgcggattcttaggaaccgctgctgctgtataaggatcttgtaccaaagaagtttacggaacatgcataatcagggacatgat

SEQ ID NO: 51602 - DNA, 435 bp, Gossypium hirsutum
  Clone ID: LIB3197-041-Q1-M1-H5
gaattaagcagttttttgtagcagttgaaagggaagagtggaagtttgatacactatgtgatctttacgacacgttgacaatcactcaagctgttattttctgcaatacaaaacgaaaggtcgattggctaactgagaagatgcgtagcaataactttacggtatcctcaatgcatggagatatgcctcagaaggaaagagatgcgattatggctgagtttcgggatggtgcaacccgtgttcttatcactacagatgtttgggccaggggacttgatgttcagcaggtgtctctggtgatcaattacgacctgccaaacaatcgagagctttacatccataggattggacgttctggtcgattcggacgaaagggtgttgctattaatttcgtgaaaagcgacgacatcaagattcttagagacatagagcagt

SEQ ID NO: 51603 - DNA, 360 bp, Gossypium hirsutum
  Clone ID: LIB3197-041-Q1-M1-H7
cttctttttgatgattggatttttgttgagggacatcggacatgttgtcgatgaacaacggagtgaccatctctagggattccacctacggaggcagtgtcgtcgatcgtactgatgttatttccgacgctccggcactggcttccggcaaagcttccatttatggggcgaaacatgagccggcttcatcccttggtattgtgcctcatagaggacctgattcacttgaagttgatgaagatatgcagttggctctagctcatcaattgtacaaatctggaaactacaaacaagcattggatcatagcaatgctgtttacgaccagaattcgcttcgtactgataatctacttcttttgg

SEQ ID NO: 51604 - DNA, 407 bp, Gossypium hirsutum
  Clone ID: LIB3197-041-Q1-M1-H8
gttcccctttcttcttcttcctccataatcaaaagctctctctcaaattttttaaaaaaacttaaaaggctcccttttttttaaagaaagatttaaatggccgtcgattccgcaatctcgtctcctttgggtccgccggcatgcgagaaagatgcaaaagctttgcgattcatcgaggaaatgactcggaacgccgacccggttcaagaacgagttttgtccgatatcttaactcaaaactcccaaaccgagtaccttcgaaggttcaaactcaatggggcaagcgatcgtgactcgttcaaatccaaacttccggtcattacttacgaagaccttcagcctgaaatccaacgtatcgctaatggcgaccgttccgccattttatcagctcacccaatctcagaatt

SEQ ID NO: 51605 - DNA, 388 bp, Gossypium hirsutum
  Clone ID: LIB3197-041-Q1-M1-H9
cggacgcgtgggcggacgcgtgggcggacgcgtgggcggacgcgtggggccaattgtttgagctagctagctcttactcaaatggcaaccaaaacgatgatgttgcaaatatttccacttttcttctttttgttcagtgtctgcaactccattttccttggtgctaatggagatgacaatggtggttggcaaactgcccatgccaccttctacggtggtgctgatgctaccggcacaatggggggagcttgtggttatggaaacctgtacagtcaagggtatggaacgagcacagcagctttgagcactgcacttttcaacaatggcttgagctgcggtgcctgctacgagctccggtgcaacaatgatcctcaatggtgcattagtc

SEQ ID NO: 51606 - DNA, 459 bp, Gossypium hirsutum
  Clone ID: LIB3197-042-Q1-M1-A1
agcgaagctacggaccccaaaaacctcagaggtaaaatttattagcatcgtcgttcgtctccttccaaaccctagaatacgtgaggagtgagttgagtagaagaagagaaaaggaacttcgaatttttgtgctttgctttcccgtgatctgaaaaaagtaacacggcgaacttgcgatttcatttttgagctgatgatgatacatatttcatgaatcattaactcatggatcctgaaggcaagaaatttggaggaggaccgagggaacttagcggtgctgttgatcttataagtcactataagttattgcctcaccatgacttcttctgcaagagacctcttccagtatcaatctcagatacacattatcttcataatgtggtgggagatactgaaattagaaaaggagaagggatgcagctggaccaacttattcagaatacatgtcataacagagac

SEQ ID NO: 51607 - DNA, 399 bp, Gossypium hirsutum
  Clone ID: LIB3197-042-Q1-M1-A3
taaaaatatcccctcaccaccgctactattattataccattactctactacagctgctatcattactacatacatgtccacccaaagtcgagcagttggcggcaccgagcacaactggtgccgagcggtggtcgggggaaccgggatagccgtcttggctatcatttcttccaaaaaccccgacgtttcacatcttaaaaatgccctccacaagctccaaatctcccatcccattcttaggtctcgcctccattacagtcctactgacaacagttactccttcgttacctacccctcccctttcattcaaatcaagtactttaaccattctacaacttgtcaaatccttgaaaacaaccaaaacatctcaccccttcatttgattctcgaacacgagct

SEQ ID NO: 51608 - DNA, 321 bp, Gossypium hirsutum
  Clone ID: LIB3197-042-Q1-M1-A7
aaaagaagaggaaaaaccagaaaaatggcgaaaccccaacttttatttctattttccttttcccttctctgtctcatttctttttccgccgccgattcctccatcacagccgacttacgtctcaccgattccagtttcccgtcggttcatgcgaagaagctgattagggagttgaatttgtttcctaaaggggaagtcaatgtcgttgacgaacaccgggtttcgttgccggagggtcccaaactggtggagaagcggttcaagttcccaactttggaagtgcccggtggagtttccttttgggatttgggtcaccatgct

SEQ ID NO: 51609 - DNA, 305 bp, Gossypium hirsutum
  Clone ID: LIB3197-042-Q1-M1-A9
tttctctccatctagccgtctcgcgtgcgccctgtggctctcttcaaccctcgcatatctcttcaagatctgatctgatctgacaaaaaaatgttcgggagagcaccaaaaaaaagcgataatactaaatactatgagatattgggagtgcccaaaaccgcttcccaagatgatttgaagaaggcttatagaaaagctgcaattaagaatcatcctgataaaagcggagatcctgaaaaagttaaagagttggctcaagcttatgaggtgctgagtgacccagagaagcgtgagatatatgatca

SEQ ID NO: 51610 - DNA, 366 bp, Gossypium hirsutum
  Clone ID: LIB3197-042-Q1-M1-B1
aactggtccagtgaaactaaatggtttaagtaatggtagcagtattgatctctcctcacagcaatggacgtatcaggttggacttaaaggggaagattcgggtctaccaagtggaagttcatcggaatgggtttcacaacccgcattgccaaagaatcaacccctaatatggtacaagacaaattttgatgcccctactgggaatgaccctgttgctttagacttcatggggatggggaagggtgaagcatggatcaacggacagagcattggacgatattggcctgcctatatcgcttcaaacagtggctgtactgactcttgtgattatagaagaccttatagtgcaaacaaatgccgcaagaa

SEQ ID NO: 51611 - DNA, 352 bp, Gossypium hirsutum
  Clone ID: LIB3197-042-Q1-M1-B2
acccacgcgtccggcccgggctcttcttctttgactcgtcgtctgcctgtgctcttctatccgattcagaagcttcgtcgttgccgcctcttctttttctaatgacaaccgagaatttgtgatcgttggaggaggcaatgctgctgggtatgcagccaggactttcgtcgaacacgggatggccgatggcaagctgtgtattgtgtccaaggaggcatatgcaccgtatgagagaccggctttgacaaaaggctacttgtttccactagataagaaaccagctcgattacctggttttcatacttgtgttggatctggtggtgaaaggcaaactcctgaatggtacaaagag

SEQ ID NO: 51612 - DNA, 409 bp, Gossypium hirsutum
  Clone ID: LIB3197-042-Q1-M1-B3
gccaaacgagtctttccaaacccaatggattctgtgtttgcctccattgttcaagctcctgaagatcccattcttggggtgacagttgcttataacaaggatccaagcccaaacaagttgaatttaggtgttggtgcttacagaactgaggaaggaaaacctctagttctaaatgttgttcgaaaagcagaacagcttcttgttaatgacctgtcgagagtcaaggagtatcttcctattcttggtctcgcagagttcaataaattgagtgctaagctcattcttggtgatgacagtcctgctattcaagagaacagagtggctactgctcagtgcttgtctggtactggttccttgagggttggagctgagtttttagcaaagcattaccaccaacgtactatataca

SEQ ID NO: 51613 - DNA, 265 bp, Gossypium hirsutum
  Clone ID: LIB3197-042-Q1-M1-B7
aaaaaaaaacggaacaatttaactagattctgcacgtagttgctgtgatctcacaatgggttcagcagcttctgagtatcaaccattgctgctgggtctcgactcccattctcggatacccgatttgtcatccgttgcagtcgaagagtttttgcagcacagaccgattgcccttcgatggtggccaaggcttgtagcatgggagtccaggcttctttggcttctatctgggtcttctattggtctttccattttcaattacatg

SEQ ID NO: 51614 - DNA, 272 bp, Gossypium hirsutum
  Clone ID: LIB3197-042-Q1-M1-B8
cccacgcgtccgatgatgtctacaacacacttgctagtattcctacttggagtggtgactctcaccactcccacatttggtacctatgagtcaccaaattatgggaaaccccctactcctgtattcaagcctcccaaggtgaaaccaccaccatatgaacctaagccaccagtgtatgaaccaccaaaaaaggagaagcctgaacctaagccaccggtttatgcacctccaaagaaagagaagcatggacccaaaccaccaatgtatgaacc

SEQ ID NO: 51615 - DNA, 437 bp, Gossypium hirsutum
  Clone ID: LIB3197-042-Q1-M1-B9
gtctaattgaatttcacaaacccccaaaatgggtaacctcatgatcatggcgggtctcctggttgcggtgtcgacggcggcaaccgttacggacgcgcaagcaacttgtgcggcaaagctagtgtcttgttctcgttacatcctaaacaccaccatcaaacctcaagatgactgttgtaacccgatcaaggaagaggtaaccaacgatctttcctgcctttgtaacctctacaaagaccctaaagtttttgcttctttgaacatctccaccgcgcaagctctcaatgtcactcgtgaatgcggcgtcactactgatctaaccgcttgcaacagcaacagcacttctacaagctctgctacatccccaccaggaggacgatctgcagatcaaaatggaggtgctgacaggatatcattgactggagtaccatcggatt

SEQ ID NO: 51616 - DNA, 448 bp, Gossypium hirsutum
  Clone ID: LIB3197-042-Q1-M1-C1
cagatagagaagaagaaaagaaagaaattttattattaatattatcatttctttttgtgtggaaaattaagggagaaaggggaagatgaagatcacgtcgttattggtgttgaagtgcaacccagaaggatcggatccgatcatattagcgaacgcaactgatgtgagccatttcggttacttccaaaggtcaagcgtgagggagtttattgtctttgttgctcgaaccgtcgccaaacgtacacctcccggccagcgtcagtccgtccagcacgaagagtacaaggtacacgcttacaacagaaatggacttgttgccttgggatttatggatgaccactatcctgttcgaagtgctttttcgcttctcaaccaggtgctagatgaatacctgaaaaattttggggaatcatggagaactgtgcacgctgatagtgctcaatcttgg

SEQ ID NO: 51617 - DNA, 423 bp, Gossypium hirsutum
  Clone ID: LIB3197-042-Q1-M1-C2
cttggcggctgctgcttctgctcaggcagcggcagcggcagccgccgtcaccgtcactgtcactaatgacggggcggctgtagaaagttgtattgacaacggtagtgtacagattggaggttcagataattcgacgacaacgtttttgagctccgatgggagcatcactgttcatgctggtgaaagattaggtcgcggtattgttactgatgcaataaccaccccagtggttaatacttctgcttacttctttaagaaaactcaggagcttattgacttcaaggagaaacgtcatcacagttttgaatatgggcgttatggaaatccaaccacagtcgttgcagaggaaaagataagcgcacttgagggggctgaatcgaccctgattatggcatctggtatgtgtgctagcacagtcatgct

SEQ ID NO: 51618 - DNA, 360 bp, Gossypium hirsutum
  Clone ID: LIB3197-042-Q1-M1-C3
gtttttcaatgcgagaatgatttcaaatgtgagggatgtaagtacgcagaaaatgtttctttcagtaataattttattcactcattttccactagcatcttcaattgcgatcagggattacatctaacaagacagcgagatcaatttaaatccctgtttgtaacagcatctttggtagcatctgccatgctcctctctgtgtagtttagtgcttaattgtctcccatttcagattcacactctttgtacgtaaactgtggtggcgatgatgtgtcaataaaatggcaaacttatataggagatagaacgtttggatctggtggtgctgcaacattatatcggaatggtgataactgggga

SEQ ID NO: 51619 - DNA, 452 bp, Gossypium hirsutum
  Clone ID: LIB3197-042-Q1-M1-C7
cgtttttgcgctgaaaatgcttctcgagctggtttgtcatggttttcagccatgccatgagttcagagattctgtagtcgctcttcggacttcagacactgacccactagatccggacctgtcaatggcaatttgtgacatcttggaacatgtggattctttgagagcaagctattggatatggcgcaaaaacaagctttctgtagcagccgtatgattacttgattagtggaaatgaggtgaataatgttcaaaccatcttgctaaatttgaaaagttgaaccataaatgttcgggtcggttcggttagaatgttagaaccagacagtagccctactaggtcaaaaactggttcaacctcctaaaagacccgattttatggacctcttttttttctttcaaatattttggattaatgagatgtggaccctttattacttattttttttggg

SEQ ID NO: 51620 - DNA, 386 bp, Gossypium hirsutum
  Clone ID: LIB3197-042-Q1-M1-C8
ctggagctttttcttaattcttgaagtttgtagttttgccttccagttttgagtggatttgtttttttcttttatttctgttgaagttaagtcaaaaggttttatctttctgttttatatttgtactgagcaaaacaagtagtcaaattttgggtataggatgattggtaagagcaagagtgtttgctttggtagatgcttttggggtttttcaaaatttcatcctgatagaggtttctacttctgggatagtttatagggttttcctctctgattttggagttaaagttcccttctcttaatggactaagttatgctgtagaggaaaattgaataagggttggttcattgtggatttggttctttattttgatttgaaaatgatc

SEQ ID NO: 51621 - DNA, 311 bp, Gossypium hirsutum
  Clone ID: LIB3197-042-Q1-M1-D7
cccacgcgtccgcctgcctgtttctcttttgaatttcagtgaaagaaaaaaaatggctcagttcaaagccatttcactctcttcgtccattaatcttgcaagttacggtcccaaaagaaatacattgttacattccgataatttgatctgttctaggaagttatccactttccatgagttaagtggaaaatctagttcgcttcatggtaatgctattgtaagcaacaatgtgtgtatgactctaacacctaagaatcaaggtattcaagctgttctttccagcaactcagggacggatgtttccacagtta

SEQ ID NO: 51622 - DNA, 418 bp, Gossypium hirsutum
  Clone ID: LIB3197-042-Q1-M1-F10
ggatttggtgctctaatgctcacaactgggagcagttatttatctcatgcacagatatgggcgttgcaagatgggacaacagtaatcgttggagggaagactaaccgagccaaggctgaatttccagatgagatgaatcgcttgcttgatcaggttcctgaaatagtcgagtcatccatttccaagaaaccagataacattggtggctagttttcaaggtgccggaaaggcaaaaatacgagcattcaagctagccacagttttgtagtttctggtacactcaagatattgttcaatctcaattacagtcaaaccaaagaaggcaacaacgcattcaactgagatgttaagaaccctagtcatggacaataccaaatccacaacttggcagcaaaggagcaaaatttgtttatgaaat

SEQ ID NO: 51623 - DNA, 446 bp, Gossypium hirsutum
  Clone ID: LIB3197-042-Q1-M1-F11
gttatctctgagggtgtcttaataaacgcctgcgatttactttcggtttccatttacttctttatttctacgtttttgaatttttagtaagcgaaaatgagagagtgcatttcagttcacatcggtcaggctggtatccaagtcggaaatgcctgctgggagctttactgccttgaacatggaatccagcctgatggccagatgccaagtgacaagactgtcggaggaggtgatgatgcttttaacacctttttcagtgaaactggtgctggaaagcacgtccctcgtgctgtctttgtggatcttgagcctactgttattgatgaagtgaggactggtacttaccgtcagcttttccaccctgagcaactcatcagcggcaaggaagacgctgccaacaacttcgcccgtggccactacactattggcaaagagatcgttgactt

SEQ ID NO: 51624 - DNA, 452 bp, Gossypium hirsutum
  Clone ID: LIB3197-042-Q1-M1-F4
ctatgcagaggatgccatttcttttgccaatgtggatataatttctccagcacagaaactgttggctaaccagttgacatgtaatgttgtaccaggaaagagcctgcttgttactggtccaaatggtagcggaaaaagttctctcttcagagtacttcgaggtctctggcccattgtgactggaagactttataaacctatccactattttgatgaagaggctggatcgagttgtggcatcttctatgttcctcagcgaccatatacatgtctgggaactttaagggatcaaatcatatatcctctctctcgtgaggaagctgagatgagggaattaaagttttatggaaaagatgccataaacattcttgatgctcgattgaaaactattcttgaaaatgtccggttgaattatcttttgcaagagaggatggtggttgggattcaatctt

SEQ ID NO: 51625 - DNA, 352 bp, Gossypium hirsutum
  unsure (1)..(352): unsure at all n locations; Clone ID: LIB3197-042-Q1-M1-F5
aatttctcttggggcgttggtccatctcatagagggtggaggacaccagttcagtgagagttactgtnacatgttgtttaatagcataatatatgcatcatacacaacacaaccgcttgagctacttaatgcattgggactagagaatccaatgaacccctctattttaagagatttaaaggttcattacatatgtttatcaatttaattctacggataatgggaacatttcaccacttgcatccctttataacaacacaaagaatactaatgcatttgttttacaagatcacagtcaagatttttcattacaacctatttcatatggatctgaaggtgttcccttaccttc

SEQ ID NO: 51626 - DNA, 256 bp, Gossypium hirsutum
  Clone ID: LIB3197-042-Q1-M1-F6
gtgaaccgcactggcacattaatttcacgagcctaataaactccggaggggcggtgccttatctctttcaaccttagcttataattggatatccggataatgattagatggcctttacgttcacatttgatcacgctgttatccaattcggaaatgcctgctgggagctttactggctttaacattgaatccaacctgatgcccaattccaatgacaagactgtcggaggaggtgatgatgcttttaacacctttt

SEQ ID NO: 51627 - DNA, 419 bp, Gossypium hirsutum
  Clone ID: LIB3197-042-Q1-M1-G10
ggctttggagatctgtgtcaaggctgctgttggtgcccctaatgttcttggagactgtccattctcccagagagctcttcttactttggaggaaaagaagatttcctacaacatgcaccttatcaatatcagtgacaaacctcaatggtttttggagataagtccagaagggaaagtaccagtggtgaagtttgatgacaaatgggtggctgattctgatgtaattgttggaatccttgaagaaaaataccctcagccttgtctcaaaacccctcctcaatttgcctctgttggatcaaacatatttggaacttttgtcacatttttgaagagcaaagacgctaatgatggatctgagcaggctttgcttaatgaactcaaggcattggatgaacatcttaaggcacatggcccattca

SEQ ID NO: 51628 - DNA, 452 bp, Gossypium hirsutum
  Clone ID: LIB3197-042-Q1-M1-G11
cgccttcgggtggaaattgtggaactcccccacatgacccttcaactccatcaacaccatcacacactcctcctcatggtactccaccatcatctggaggtggtagtcccccatcgtatggaggaggcagtcccccatcgtatggaggaggcagtcccccatcgtatggaggaggcagtcccccatcatacggaggtggcagtcccccatcatatggaggtggcagtccaccaactactcccattgatccaggaactccaagcattcccttcacctccattctttcctgctccaactccaccaattggtggtacatgcgatttctggaggagtcaccccacactgatatggggtctgcttggttggtggggcactgtacgcaacgcatttggcgtgaccaacgctcctggacttggaacaagcatgaacttgccccaagcactttcaaacac

SEQ ID NO: 51629 - DNA, 442 bp, Gossypium hirsutum
  Clone ID: LIB3197-042-Q1-M1-G12
ccttatcagtgtccacagttcaccccttgtgtgaagcagacgacaaagtgtataatctctctcaacagcctcaagccctctttttttttcttttttcttttttcttttttttatgttttgtgcataaatggcatcatcccttctctctagaactcttttgggtcatcgcttaattcgattctcctcgtctctccctcacaaccccttgattttctctaatcttttcaataagagagagttctgtgtacaggctgggtcttaccataccacatataaggcctctggtcagccttctcgtttaatggcttctgcagcaattgagataagaagtaatttttcgacacaatctctttccaccaatgatccggttgtttctgttgattggcttcatgctaatttaagggagcctgatttgaaggtattggatgcatcatggtacatg

SEQ ID NO: 51630 - DNA, 255 bp, Gossypium hirsutum
  unsure (1)..(255): unsure at all n locations; Clone ID: LIB3197-042-Q1-M1-G5
cggacgcgtgggctccctgctttgctctgaaaagtgcaagtttttctccaatggcgaccgtctctccaactcctctgttgaaagatgagctcgacatcgtgattcccacgattaggaacttggactttttggagatgtggagaccctntttccagccttaccatctcatcattgttcaagatggtgatcctaccaagaccatcaaggtccctgaaggcttcgattatgagctttacaataggaacgacatcaaca

SEQ ID NO: 51631 - DNA, 460 bp, Gossypium hirsutum
  Clone ID: LIB3197-042-Q1-M1-G6
cggacgcgtgggttgcactgctctttctttctatagaattagtcactcctgttgtagatgaaggttctctccccaattcttgcttgcctagcgcttgctgtggtggtaagccatgctgctctctcacctgagcaatattggagctataagctgccaaatactccaatgccaaaggctgtcaaagaaattctacatccagaactgatggaggagaaaagcacctctgtaaatgtaggaggtggtggtgtaaacgtcaatacaggaaaagggaagcctgggggtgacacccatgtgaacgttggaggcaaaggagttggagtgaacacgggaaagccagggggtggcactcatgtgaatgttggagacccttttaattacctatatgcagccagtgaaactcaaatccatgaagacccgaatgtggctcttttctttctggaaaaggatatgcaccccgggg

SEQ ID NO: 51632 - DNA, 454 bp, Gossypium hirsutum
  Clone ID: LIB3197-042-Q1-M1-H10
attccagaagatgacccagttagcccaatcctaaaagtcggtggagaaaaagagattgggaaaaatgggttgaagaagaaactggttaaggaaggtgaaggttgggagaatcctagcagtggtgatgaagttgaagtgcattatactggaactttgcttgatggaaccaagtttgattcaagccgtgatagaggtactccattcaagttcaagcttggccaaggacaagttatcaagggctgggatgagggtatcaaaacaatgaagaaaggtgaaaatgcaattttcaccatacctgctgagttggcgtatggcgaatccgggtcacctccaactattcctcctaatgcaacccttcaattcgatgtggagttgctttcttggacaagcgtcaaggacatatgcaaagatggaggaatcttcaagaaaatacttgttgaaggggagaaatggg

SEQ ID NO: 51633 - DNA, 452 bp, Gossypium hirsutum
  Clone ID: LIB3197-042-Q1-M1-H11
cggacgcgtgggtttgctacatgtggaagacgggagagtatggaggacatgcactttcttatgcctttcctatgcaatgagaaggatgttcatgcttttggtatcttcgatgggcatagaggtacacaaaaccatgatacagaacgctgaagatgcagtagagatcatatatgaggacaaattcttgtaaatcttatctgagaaattaattcaaatacttctctgcccccctctccttgtttgaagctactaaatttgtctgcgttgaggttgaatctagttttcttggtcctatatattatataatgtatataaatttctgttctctggaaaacttgcaggtgcagcagcagctgagttttcagttcaagcattgccagaatttctgaaagccttaggttctatgtgcagtcctgctgatgcactggtggaagcatttgttaggacagatg

SEQ ID NO: 51634 - DNA, 425 bp, Gossypium hirsutum
  unsure (1)..(425): unsure at all n locations; Clone ID: LIB3197-042-Q1-M1-H12
cacaaaaggactccaaatttcctctctgtacttttcttcatttttattttctttatatttgttagtttagtatcaaatccatgtcggtttctggtatccatggccatgttctcgaggttactgttgttggatgcaatagattgaaagataccgaatggctttcaaggcaagatccttacgtttgtcttgaatatggcagcactaaataccgtactagaacttgcactgatggtggcaaagcacctgtattccaagagaggttcacattcacattgattgaagggcttagagagatcaatgttgtggtttggaacagcaatacattgacttatgacgattntatcggcagtggaaagattcaattgcagaaggttctttctcagggttttgatgatactgcttggtcacttcaaactaaaaccgga

SEQ ID NO: 51635 - DNA, 447 bp, Gossypium hirsutum
  Clone ID: LIB3197-042-Q1-M1-H4
attatctctagtgatggtgtttgggatgctttaacagctgaagaagctcttgattgttgtcgtggaatgcctccagatgcagcagctgcccagattgtgaaagaagctgtaaagccaaagggtcttcgagatgatacaacctgcattgttgttgatatcttaccacaagagaagccagctgctctgccaccaccaaagaagcctgtcaaaggtatgttaaaagccatgtttcgcaagaagaattctggatcatcttctcaagataaagattacatggaaccggatgtggtggaggaattatttgaggagggatctgcttggctttcggaaaggttggacactaaatatccactatgcaacatgtttaagctgttcatgtgtgcagtctgtcaattggagatgaagcccggagagggcatttctattcatgttggcacatctaatccg

SEQ ID NO: 51636 - DNA, 435 bp, Gossypium hirsutum
  Clone ID: LIB3197-042-Q1-M1-H5
cccagatgggaaaacaatagaagcagaagctgctcatggtactgttacacggcatttcagagttcaccaaaagggtggtgagaccagcacgaacagcatagcatctatctttgcttggacacgtgggcttgcacacagggcaaaattggatgacaatcctaaactcttagatttcattgagaaactagaggcagcttgtattgcaactgtggaatctggaaagatgaccaaagatcttgcactaatcattcacggctctaagcttgctagggacaagtacctgaatactgaggagttcattgatgctgttgcagcagatctaaaagcaagactttgttaagtataaatttgaacatggttgaaaatggaaggggatggttttgtgggtttgcaggaaaaataataataataaaaagcgtcagtggaggtggcgtg

SEQ ID NO: 51637 - DNA, 463 bp, Gossypium hirsutum
  Clone ID: LIB3197-043-Q1-M1-A10
tttctgaagtggagcccaatccagttacaataataaatatcctctcgtcatgcacccatcttgctcatttgcctcagggtcgttgtttgcatgcttacatgatacggagggaatcctctttaggtcacaatttgtctcttcaaaatgcttttataacaatgtatgcaaggtgtggaagcatgagaaatgctgaaaaaatctttgaaaccttaacaaggagaaatattatctcgtggaatgctatcataatgggttacggaatgcacggtcatggttatgatgctattcttgccttctcgcaaatgctagaggatggtttccaaccaaatgaagtaactttcatatctattttatcagcttgcagccattctggtatgatagaggaaagactgcagctttttgattcaatggttcatgattttaacatcacccctcagcttgctcactatggatgtgtagttga

SEQ ID NO: 51638 - DNA, 89 bp, Gossypium hirsutum
  Clone ID: LIB3197-043-Q1-M1-A11
tcttttattaattaggacccaatacatttaggagggtgaatatactttcgtgagagaacccatatttttcatttgcctgagggcaattg

SEQ ID NO: 51639 - DNA, 329 bp, Gossypium hirsutum
  Clone ID: LIB3197-043-Q1-M1-A4
actcaatagcctggacgccattatcattttcgcctttgcatgtcaaaacatcaagtctgttcaaatgatagcagttcccaaaatatctatttttatttgctaccttttccgtttcatttcaccgtccacatcttcagcccgaattttgtggccatctttcttctggagtagtttcattgcatttcaacgtctctcccaccagagacaagacgttggaatgaagaatcgattttgaagctttaaggtttcaaacaactagtcttgaagtccatctggagtttctaatatcaaaagctgcatcgaactgtattgtctgccttatcgacccc

SEQ ID NO: 51640 - DNA, 472 bp, Gossypium hirsutum
  Clone ID: LIB3197-043-Q1-M1-A5
ctctacttcactactcaccacccgcccttcctattttagtttatatactccctccaaaaccctagcgctttcactcgccgccgccaatttcaacacaattagatagattcttgataagactcgaaagcgatgtcagacgacgagagagaggagaaggagctggatctcagctcctctgaagttgttacaaaatacaagggcgctgctgagattgttaacaaagctttacaattagttgtaaaagaatgtaagccgaaagctaagattgttgacatttgtgagaagggtgatgcatttataagagagcaaacaggtaacatgtacaagaattctaagaagaagattgagaggggtgttgccttccctacttgtctctctgtaaacaacacagtctgccatttctctccacttgctagtgacacctcggagttggaagaaggtgatatggtcaagattgacatgggttgccaca

SEQ ID NO: 51641 - DNA, 459 bp, Gossypium hirsutum
  Clone ID: LIB3197-043-Q1-M1-A6
cacacacacacacacaacaattacaacttttctttgatatccgcatttctttctttttctcttttcttgttcttgttcttgttccccccttgttgatattctctatttacttagagggattaatataagaaggcaatgtgggatggtggggttgtgggctcgatttggcgtttgaagcctgcctccctcccttagttggtttttaggtgctttcgggactaattggttgcctgcttttgacgatgatggcgaaacttaattttgtaaagaacggtgtgcttagattgcctcctgggttccgcttccatcctactgatgaagagtaaacggttcagcacttgagaagaaaggtgctatcttgtaccttacctgcctctatcatacctgaagttgatgtttgcacagctgatccttgggacttgccatgtgacttggaacaagagaggtacttctttagca

SEQ ID NO: 51642 - DNA, 422 bp, Gossypium hirsutum
  Clone ID: LIB3197-043-Q1-M1-B10
cttccacagccttctcttctccaccaatccaaaaaaaacaaagatgcagtacaaaaacctgggcagatcaggcttaaaggtgagtcaactatcgtatggagcatgggttagtttcggtaaccagctcgatgttaaagaagcaaagtcacttctccagtgttgtaaagacaacggagtcaactttttcgacaacgccgaggtttatgccaatggtcgagccgaggagatcatgggtcaggctattagggaacttgggtggaaacgatcggatatcgtggtttctaccaagatcttttggggcggtcctgggccaaatgataagggtttgtctagaaaacatattgttgaaagaaccaaggcgtccttgaagaggcttgatatggattatgttgatgtgctctattggcataggccagacacac

SEQ ID NO: 51643 - DNA, 405 bp, Gossypium hirsutum
  Clone ID: LIB3197-043-Q1-M1-B11
attcccttctttctcaacgcgacaaaacaagggttttaggagaacatctctggtagtagcttccatggctgatctcagcactgtgctcgtcactggagccgctggcagaacaggtcagatagtttacaagaagctgaaagagaggtcggatcagtttgtcgtgagaggactcgttagaactccagaaagcaaggagacaatcggtggagcagatgatgtgtttgttggggatatcagggataccacctctctggttcctgccatgcaaggaattgatgcactcataattcttactagtgctgttcctagaatgaaacctgggtttgatccgacgaaaggcggaaagcctgagttctattttgaagatggagcatatcctgagcaagttgactggatggtcagaaa

SEQ ID NO: 51644 - DNA, 383 bp, Gossypium hirsutum
  Clone ID: LIB3197-043-Q1-M1-B4
aaaggactctgtttcctttatcctttctttcccatcagctgccgcaagctttccatcctcacggtggtccgctccttcatctggcaaccttctcccgttggctcgtccatacccttggccactatctacctccacttttatgtcgatctttggtctacacttagtttacttgtctctttacctcttccttacgtcatcttcgatgcttgctcttgcgtctttgctgctttatactcccttcactggactctcttaggtatatatgatctttacttatctttgatacgctttcagtactaattttacttctttgtttacaagtttgcttcgaatttgagcaaatttaaggtatttatttctacgagcccctaactagttttctt

SEQ ID NO: 51645 - DNA, 418 bp, Gossypium hirsutum
  Clone ID: LIB3197-043-Q1-M1-B5
cgaagaatagggcatgtttccgcagtctctttatcgtagcagctttggtctgcggtgcttatttcattagtaatgcatttatcactaacgaatacaaagatagattatcgagatgggaagtgattaatatgcttcggaattcaaaatctgttacgtgcaagaatcaatgcaggccacctgggagtgaagcattacctcaaggaatcgtggtcaaaacatcgaacttgcaaatgcaaccattatggagcgacagtgtgaaaaacgtcaatcctgagacatcttcaaacttgttagccattgctgtcgggattaagcaaaaggaaatcgtggaccaaattggtaaaaagtttcccgtaagtgattacgtcgttatgcttttccactacgatggtatcgcggatgaatggaaagattttga

SEQ ID NO: 51646 - DNA, 388 bp, Gossypium hirsutum
  Clone ID: LIB3197-043-Q1-M1-F1
cccacgcgtccggaacaacttaagaagcgaaaaaacaaaccgcaaaaaaaaacagaaaaaaaaaaaagtaaaaaaaaaagaaaataagcaaaaatgaaaagtgcacaaaaaaaaaaaaataataaaaaaaaaaattaattaaaagattcaaaatttaacaaaaaataaagcgaaaaaataaaagaagaaataaaaaaagacaaaaaaaccacaaaatggaaaaaaaaaaaaaaaaatatttggaaaacagaacccaaaaaaaacatataggagaaaaatcacaaaggaaaaaaaagaaaaaaaacaatttatgaaaaaagtgtgtaaaacaatttataaataaaaaaaaaggaattttaaataaaaaaaaagggcaaaagagacaaat

SEQ ID NO: 51647 - DNA, 442 bp, Gossypium hirsutum
  Clone ID: LIB3197-043-Q1-M1-F2
ggaacagacgatcgtcctcttcccgcaatggcggatgctcaaactgaaaaacccctttccctttccgagcaatatgcacttcaggagaaagaggaaaaatcagatgtgactacaaaaccagcagaagcaaaagaggttgaaaatcctgtaaatgcagccactggttctggggatgttgtaactgagaaattggaggagacttctgccgatccagttgagggaagcactgaggcccctcctcctgctgctgaagaaagcactgaagcaaatcctgctactgggaacagtggtgaagatgctgcagaggaaaactcgggtgactctgaggaaactccagagataaaagcttgagactgccccagcggatttccgcttcccaactacgaaccaaacaaggcattgcttcacacgatatattgagtaccaccgttgtgtagctgca

SEQ ID NO: 51648 - DNA, 464 bp, Gossypium hirsutum
  Clone ID: LIB3197-043-Q1-M1-F3
aaatacgaatctctattcaatacaggatagcagtgatagtactggcatggccattcgaatgtttggttctgataagcataagcctgtttatgttatggattcttacagcagcgagagctacgaaaagtacttccttgattctcctacagatgagcttatacattcatctagttctggaatttctggaagttcggttcgcctacaagatgtctcttcttgccagataagagattacttggaaatccaaagcccagatacactagactctgatttggataagatgaaactgaagcttaaagaactggagagagctctgcttgctgataatgatgttgatggggatgatgacatgtttggcactggtctaagcatggaagtaaatggtgagtggtctgatcctatcaagatgggttctcatcacgactcgccaaaggagtcatcatcctcgggtacttatctcgata

SEQ ID NO: 51649 - DNA, 376 bp, Gossypium hirsutum
  Clone ID: LIB3197-043-Q1-M1-F8
taattttgctgcttccaactttcagttcacacgaaaaataaaatacatacactgaaaactaacggcaaagcttcttcttctcttcatcttcatatctgagaatggaaaacccaggatcaaatcagcttcctgaagtggactcattgccagatggttttgttgagagtccttcagagattttggctccaaaaaccccaatttctaaagaagaaaagcctttgctccctgattgtaaagaagatgatttagtctccagtgagtttggagcaaacaagggccaaaaacaaagaatgttccctgtgccattgtctgaggcagatggttttgagggctcagcagactatgtagaaggtaaagtagtctgtcccgagttgag

SEQ ID NO: 51650 - DNA, 468 bp, Gossypium hirsutum
  Clone ID: LIB3197-043-Q1-M1-F9
ggtggagatgctgaaatcttaaagctgcaaatagctctggaggatgaggttcatcagaaaaagaagcttgaagaagaaataataatactaagaagtcagatgttacaactgacttttgaagccgaccagatgagaaggtgtcttgcaagaggtggatctggaaatgcttatcccggtttagattctccaatgtctcaagttagggactctttgagtggacataagacaccagtttctgcactatttgatcaagttggagtgcaaaagatattggatttgcttgagtcagaagatgctaatgtacgcattcatgctgtaaaagtagtggcaaacctagctgctgaagaagcaaaccaggaaaggattgttgaagctggtggtcttacttccttgctgatgcttctaagaagttatgaggatgaaactgttcgcagagtagcaaccggtgcaattgctaatcttgcaatg

SEQ ID NO: 51651 - DNA, 400 bp, Gossypium hirsutum
  Clone ID: LIB3197-043-Q1-M1-G1
aactggtccagtgaaactaaatggtttaagtaatggtagcagtattgatctctcctcacagcaatggacgtatcaggttggacttaaaggggaagattcgggtctaccaagtggaagttcatcggaatgggtttcacaacccgcattgccaaagaatcaacccctaatatggtacaagacaaattttgatgcccctactgggaatgaccctgttgctttagacttcatggggatggggaagggtgaagcatggatcaacggacagagcattggacgatattggcctgcctatatcgcttcaaacagtggctgtactgactcttgtgattatagaggaccttatagtgcaaacaaatgccgcaagaattgtgggaagccatcttagcaattgtaccatgta

SEQ ID NO: 51652 - DNA, 399 bp, Gossypium hirsutum
  Clone ID: LIB3197-043-Q1-M1-G2
aaaagagagagaatggcttggatatggttggaagctgcacttcctcttggaatcatagctggaatgctctgcgttatgggcaacgctcagtatttcatccacaaagcctatcatggccggccaaagcacatcgggaacgatatgtgggacgtcgccatggaaagaagggataagaagctcttcgagaacctctcttcctccgattgatccctttttagtttattactggttaaatgtaggaatcttggccaatggagcgatggagaagaaataaaagttctttatgatgttttgtcctgctgaaagaagactaaagagtcaaagtattttcttttttgtaatatgaagcatgaattccggatatgttgcactttttacaacaggtgctaaatgtttaca

SEQ ID NO: 51653 - DNA, 443 bp, Gossypium hirsutum
  unsure (1)..(443): unsure at all n locations; Clone ID: LIB3197-043-Q1-M1-G3
acaaaaccctaaaccctgcctttccctccctcaatcatccaatggcggagctgaaactctcggagagccgagacctgacccgaatcgaacgcattggggctcattcccacatacggggcctaggcctcgactcctctctggagccccgtgacgtctcggaagggatggtgggccaagcagaagctcgtaaagccgccggtgtcatgctccaaatgatcaaagacggtaaaattgctggccgtgctatcttattagcgggccaacccggaaccggaaaaaccgccatcgccatgggcatggcgaaatcccttggccttgaaacccctttctctatgctctctggcagcgaaatcttctcccttgagatgtcgaaaaccgaagctttaatgcaagcgtttcgaaagtccatcggngtaagaatcaaggaagaaactgaaataatc

SEQ ID NO: 51654 - DNA, 459 bp, Gossypium hirsutum
  Clone ID: LIB3197-043-Q1-M1-G7
ggctacttgtgcttggttactctccctttgctttactctcgttttctgtctgtgtaatgcctctcgtacgccacccatttccccatcccttgatggatttttgaccaatggtaacttcgagcaagcacccaagaaagagaacctcaacaaaacagtgatactggggaaatactcgcttccaggatgggaaatcgatggcacggtggagttcatgtcagggggacctcaacctggtgggttttacttccccattccacgtggtgcccatgctgtgaggctgggcaacgaggcgtccatctctcagaatgtgaatgtcaagcctggcttcatttactccataacatttggtaccacaaggacttgcgcccaaaaagaggtgctcaagatctctgtccctgctcagaccactgacatctccattcagaccctttacagcacggatggtggtgacaccatggc

SEQ ID NO: 51655 - DNA, 395 bp, Gossypium hirsutum
  unsure (1)..(395): unsure at all n locations; Clone ID: LIB3197-043-Q1-M1-G8
gattttatccgtaacaatcgactcatcaatggggggaaagatcttcctcgagagtacttgtctgagcttttcctctctatctgtgagaacgaaattcaaatgatcccagaccaagatgctggtgtcccagtaatgacatcaagccgctggattaatgtggtgaataaatccaaaggaagcaccccttttattgcctgcgattccagagcactccttgaccatgatatgtttactatcctttccggtcccacaattgcagctttgtccgtggttttcgatcaagtggaacaagaagatgtcttaccaaatgtgcattgatggattcttggccattgccaaactttcagcgcactatcactntggtgatgtattggatgattttggtgtgtctcttt

SEQ ID NO: 51656 - DNA, 422 bp, Gossypium hirsutum
  Clone ID: LIB3197-043-Q1-M1-G9
ggcgagtaggcagtggcagatgggcggtttctttggttttcaagccaatctccaacgtctaccttcgttatctccgccaacattaacacaaagcgtatttatttaagatagaaaaaatatcaaacaattggcatgcacagtctccgcctagcttcttccgctcattcccagtctctcttcacaatgtccgccgcctccgcttcccttgctctcccttctcccctttcttcgtttcgctccaatggacctcttccttctagatgcttcctccgcctcaacaacccctcaagatctagggttttcatgagtgtctccgttggatcccaaactgtcgtcgatgatgccttgttcgctgattacaagcccaacatccgcctttctctttcccggtcaaggcgctcaagccgttggaatgggaaaag

SEQ ID NO: 51657 - DNA, 469 bp, Gossypium hirsutum
  unsure (1)..(469): unsure at all n locations; Clone ID: LIB3197-043-Q1-M1-H1
gcaaagcattagcaaccatagccatggcttcctcaccaaaactcttctctatgtctatcctcttcctttttgccctcttctccatgcaaatccatgctagagagtacttcagcaaattcccaagagttaacaccaatgagaaagagacaacaaccagagagcaagagcacgagaccttcgttccccagaccacccaaaagccagaagagcaagagccaaggttcatccctgaaacccaaaatggttatggcctttacggccacgagtcaggctcaggctcatgctcaggctcaagccggcccagtttcaccaccaaagaaacctatgaaccctatgtcacccctgttagattccaccctgatgaaccctataacagcatccccgaatccttcaacaattaaagacacttactactacaacaagaatgcctacaagtncactaatcagcaaaacttgggcgaggccattt

SEQ ID NO: 51658 - DNA, 415 bp, Gossypium hirsutum
  Clone ID: LIB3197-043-Q1-M1-H2
accggcatcattgtgttggctgaaggacgtctcatgaacttgggttgtgctactggccaccctagctttgtcatgtcatgctctttcaccaaccaggtgatcgcccagctcgagctgtggaaggagaaggcaaccggcaagtacgagaagaaggtgtacgttttgcctaagcaccttgatgagaaggtggctgctcttcaccttggaaagcttggggctaacctcaccaagctcaccaaggatcaggctgactacattagcgtccccattgagggtccttacaagcctcctcactacaggtactgaggagagaatacgagagagagagagggagagagttggactagaaaaagtaaccatacaacgggatggtttgattggttgtttttactaaaatttattgatgatttgtggt

SEQ ID NO: 51659 - DNA, 465 bp, Gossypium hirsutum
  Clone ID: LIB3197-043-Q1-M1-H3
caatgcttgaaggaattcgagacagaactcgagacaattgggagtattaagcaccgaaatctggtcagccttcaagggtattctctctccccgtctcggaaccttctcttctatgactatatggaaaatggcagtctctgggatctcctccatgtttctaccaagaggaaagttctcagttgggacattcgattgaagattgcacttggagctgcacaagggttagcgtatttacatcatgactgtagtccacgaatcatccacagggatgtgaagtcatcaaacattttgttggacaaggatttagaggctcatcttactgattttggcattgctaaaagcttatgcatatcaaagtctcacacttctacatacgtaatgggcaccattggttatatagaccctgaatatgctcgcacttctcgcctgactgagaaatctgacgtttacagctatgggattgtt

SEQ ID NO: 51660 - DNA, 374 bp, Gossypium hirsutum
  unsure (1)..(374): unsure at all n locations; Clone ID: LIB3197-043-Q1-M1-H7
ttgttatctctgaaggtgtcttaataaacgccttcgatttaccttcgatttccatttacttctctattgctacgtttttgaatttttagtgagcgaaaatgagagagtgcatttcagtccacatcggtcaggctggtattcaagtcggaaatgcctgctgggaactttactgccttgaacatggaatccagcctgatggccagatgccaagtgacaagactgtcggaggaggtgatgatgcttttaaacaccttttcagtgaaactggtgctggaaagcacgntcctcgtgctgtctttgtggatctttaaccctactgttattgatgaggtgaggactggtacttaccgtcagctttttccaccctgagcaac

SEQ ID NO: 51661 - DNA, 465 bp, Gossypium hirsutum
  Clone ID: LIB3197-043-Q1-M1-H8
aaaaaaatcccatctttatagtcgttctctttctcccgggttatttcaatctgctacattgggtacccaagcactaaattttctccctggattcctctttagtaaggaatttggagttggtggtggtaaaaaatggagttttccagggtttctatgattagttgttttgcatttctcttgtgctcctccttggcatatggtgcctctagtcctccagctcctatggcaatgagtcccagtccgacaccgacaccggcaccagcacctgcaccggaatatgtaaacctaacttatttgctctctgtggctggtccatttcacacattcctcaactaccttgaatccactaaagtcctggatactttccaaaaccaagccaacaacactgaccaaggcattacgattttcgtgccaaaagatagtgccttcaaagctcttaagaagccttcattatcaaatctcact

SEQ ID NO: 51662 - DNA, 301 bp, Gossypium hirsutum
  Clone ID: LIB3197-044-Q1-M1-A1
gttttcctttttttttgattcctttggctcttgcgcagctagcaaaacaagatggcagatggcgaggatattcaaccactcgtatgcgataatggaactggaatggttaaggctggatttgccggtgatgatgctccaagagctgtgttccctagcattgtaggtcgtccgcgtcatacaggtgtgatggttggcatgggtcaaaaagatgcatatgttggggatgaagctcagtccaagcgtgggattctgactctaaaatatcctattgaacacgggattggcaacaattgggatgata

SEQ ID NO: 51663 - DNA, 396 bp, Gossypium hirsutum
  Clone ID: LIB3197-044-Q1-M1-A10
cggacgcgtgggtgatgatggaagcaatccatcattgaacagtactggttcacctgtgacatactgcaaagaaaccaatataatccgctttgctaacagttcagttgatgctaatagtcttagaaatatggtagtattggctattcacactggaagaatctactgcatcattgaagctgtgagtgataaaactgctgaaagttctttcgctgaaactgttgatacggtctcatcagagtttgctaccttctatgaatacttctacaaaaagtacaatattgtgctgaaacatccaagacagcctttgatgctgttaaagcagagccataacccgcacaacttgcttgtgaattttaatgatgaaggtgtatcagctaaagcatcacaagctggcgt

SEQ ID NO: 51664 - DNA, 334 bp, Gossypium hirsutum
  Clone ID: LIB3197-044-Q1-M1-A11
cacaattgccctctcccattcgcagctctctcaagtctcaaccaccaccgaattcccaattcttcatttcttcatttatacacttgctctaatctctcaaacaatggattcttcatcatcatcatcatcttcaggtccctcacctctcgatctcatgtcggctttaatcaaggccaaaatggacccttccaacgcttcctccgattctgctgctcaagtaaccaccgtccttttcgggaacagagagttcattatggttttaactacctccatcgctgtgctcatcggctgcgtcgtcattttgatctggcgtaaatcatcttctcaaaagcct

SEQ ID NO: 51665 - DNA, 331 bp, Gossypium hirsutum
  Clone ID: LIB3197-044-Q1-M1-A12
cgcgtccggcgatttatcgtggaaatatagctccgagagacgtggttcgaagagaggtagaggagtttaggacgcgcgatggctggctcgtggagagcatgcggctctttggtggttctagctatagttttgttcggatgtctctttgcaatctcaattgcaaaggaggaagccacgaaattggggacagtcattggaattgatcttggtacaacttattcttgtgttggtgtttacaagaatggtcatgttgaaatcatagccaatgaccaaggtaaccgtattacaccatctttggtggctttcactgacagtgagaagctgattggtg

SEQ ID NO: 51666 - DNA, 141 bp, Gossypium hirsutum
  Clone ID: LIB3197-044-Q1-M1-A2
taagagttgagtgttttactttttattttcttggaaaatggccgggaaagtgagttccaagagactaggagtgtttgcattgatgtttgtgtttgctatagggatagctgagtgtataaagtttgagaaagagaatttggg

SEQ ID NO: 51667 - DNA, 329 bp, Gossypium hirsutum
  Clone ID: LIB3197-044-Q1-M1-A3
gttaattgacctggcagtgtcacttttgcctggtttagatgagccagcattaaatctcttattcattgcaataaaacctgcattgcaggatgtggatggcttgattcagaagaaagcgtacaaagttctttcaatagttctcaggaaccaaaaaggatttctatctgccaaactggaggaattgcttaaacttatgattgaagtattgccatcattgcacttttctgccaaacgtcacagactcgactgtttgtatgagctgataacccatgcctctaaggtggatccgaacctgaagagacatgagattcttagttcttttctgactg

SEQ ID NO: 51668 - DNA, 355 bp, Gossypium hirsutum
  Clone ID: LIB3197-044-Q1-M1-A5
ctgaaggtgtcttaataaacgccttcgatttaccttcgatttccatttacttctctattgctacgtttttgaatttttagtgagcgaaaatgagagagtgcatttcagtccacatcggtcaggctggtattcaagtcggaaatgcctgctgggaactttactgccttgaacatggaatccagcctgatggccagatgccaagtgacaagactgtcggaggaggtgatgatgcttttaacacctttttcagtgaaactggtgctggaaagcacgtccctcgtgctgtctttgtggatcttgagcctactgttattgatgaagtgaggactggtacttaaccgtagcttttccaccc

SEQ ID NO: 51669 - DNA, 371 bp, Gossypium hirsutum
  Clone ID: LIB3197-044-Q1-M1-A6
ctgacgggtccttaaaaaacgcctactatctacctcaggccgacacctacgccgacgccgactcggttcaggcgctcactcacctacagcatgtgacttggcgtagtagtccaacaatgtatatatggtattcgagtctgataatgcgatgcttgaactttacggcctcgaccatggtatccagcccgatggccagacgccaatgtgacaagactgtaggacgaggtgatgatgcttataacacctttttcactgaaactggtgctggaaagcacgatcttcttacaatcgttgcggatcttgggcctactgcaatcaatgaaatgaggactgggtcatacagacttctcttacactatgggcaactcatc

SEQ ID NO: 51670 - DNA, 342 bp, Gossypium hirsutum
  unsure (1)..(342): unsure at all n locations; Clone ID: LIB3197-044-Q1-M1-A9
gaaaaatattcttatcaataaaaaatagtgttgattttcatatccaaacacttcttgttatctagcaatttataaatttccagcgtcataaagaaatcaaaccctacacttagggtttcctctctatccccttctcttagaaaaagagaaaagggaaaaacatttctttttaaagtatcaataattnttttgacaaattcaagttatgcaatatttgacccactttggttaaaataaaaaaaaaaatcttcttttttgctggttaaccagaatggtccgaaagggattaatatttggttaatgggttttaaaaattttttttactaattttggtggtaaaat

SEQ ID NO: 51671 - DNA, 321 bp, Gossypium hirsutum
  Clone ID: LIB3197-044-Q1-M1-B1
ctctccttttgaatcaatctccatttttggttcgggggtaaagagaaaggatgttaggcattttcaagaaagaattaatgaatcctccaaaggagctgcatagcccagcttcactcacttcatcaaacaagcccaagcttcccaatcaaatcatcaaccatttcctttcttcaaattccaacaatgctttctcaatggggttcggatcctcagcttgctttgcttatgctcccacagagaatcgtttccccagtcatcaaagggttgttttgttgagtggatgaaatatactgcgtattctttggggatttgaattatttt

SEQ ID NO: 51672 - DNA, 326 bp, Gossypium hirsutum
  Clone ID: LIB3197-044-Q1-M1-B10
tgcttctctgggtgtcactttgaatgtcaccaaggccatgactttgcccgctgcttgcaaagtctctgctccttctgccactcggtgtgcattgtctctcagtcctactggtgcaccaggtatggcaccgtcagcaatagcaggtgcgccggcagcattctcaggaggagcaaatgaggcagcaccggcaccatctcccggcagctcaggctctcaagttgtttctgcttcaatgggatctcttatcttaggcttcataattatgttaacctctatgtactaagctatcctctcgtgttgatttacttccccttttgtattgatga

SEQ ID NO: 51673 - DNA, 400 bp, Gossypium hirsutum
  Clone ID: LIB3197-044-Q1-M1-B12
tgctgatcccaaaaggtggcaggattccaagtggagatgtctcaaagtgcgatgggatgagacgtcttccatacctcgtccggagagagtttctccttggaaaattgaacctcctttagctcctcctgccttaaatcccctaccaatgcccaggaccaaaaggcctcgatcccatgcagtaccttcatcccctgattcctctgtgctgactagggaaggttcatccaaagttactatagacccttcgtcagctagtgggttgtcaagggttttgcaaggccaagaattctcgaccttgagaagcaactttgctgagagtattgagtcggacattgctgaaaagtcagtgatgtggcctccttctgtagatgataacaacaaatgatgtggtttctgcttc

SEQ ID NO: 51674 - DNA, 419 bp, Gossypium hirsutum
  Clone ID: LIB3197-044-Q1-M1-B2
aaagaaaataaacccaaaagcttcccaattttgctttttggttctttgatttcataattatcatcaatcaatcaatcatgaccggaaaagccaagcccaagaagcacacggccaaggaactcgccgccaaggtcgacgctgccaccaccaaccgtggtggcggcaaagccggattagctgaccgttctgggtttgagaaaggaggacatgccaaatacgagtgtcctcattgcaaaacaaccgctcccgatgtgaaatcgatgcagatccatcatgatgccaaacatcccaaaattccttttgaagaatctaagcttattaatcgtcatgctgttcatgtcgctgagccatctaagcctcgtcctggtgttaggggtagccttagaaaataataaaataacaaaaaaaaaaaataaatt

SEQ ID NO: 51675 - DNA, 361 bp, Gossypium hirsutum
  Clone ID: LIB3197-044-Q1-M1-B3
gggcactgaccaaatacagctcggtcggcccatgctcatggccgtgtctctttcgtctagtattttcgataatcttccaaaagcatggtttatatatttgtttattggagtaggtgtggttctctttgttatatcttgtttcggatgtattggagcttcgacgcggaatttatgctgtttgagttgttattcactgttggtggtcttgttgatcttggtggagctgggatgtgctgctttcatattcttcgacaaaagctggaaagaaaaactcccgacagataaaacaagatattttgatatgatatatcaatttctggaagaaaattggagtattggcaaatgggtagctcttggaatt

SEQ ID NO: 51676 - DNA, 367 bp, Gossypium hirsutum
  Clone ID: LIB3197-044-Q1-M1-B5
agggatcgaaaaatgatgagggtcctttgtaaccgtgggcggatggaaattatgttctctaaatgtgctcccaacagtatcatctgtcggtgtacaaatatcctatgcactaatggtggctccaccattccaaatgatactacgcttttgtctgagctgcactcaagactcaacagttgtgcaggacaagaaacactgcgatgactggctttaacattgaagataatgcccatgggtcatcagacactcttctttgatgatgagaaagatcttacctttattgaacaggttgggatgctagatccaccaccacaggaagtgaggaatgctatgaggtcatgcatgacacgtcggtatacgtgttatt

SEQ ID NO: 51677 - DNA, 373 bp, Gossypium hirsutum
  Clone ID: LIB3197-044-Q1-M1-B6
ctctctcatggaccttcattcgaccaatggttgaaaatctttaaatgataacatcgtccttttgcccaccactatcaaatttccagattttccaggaaaaagaaaatcaaaacccccaggtgaagaaggtgaaaaccagcagcggcaaaggcaataaaaggtgaagccaaagagagagagatatatacataataaaaaagacttttcaaaagaacacaactatggctcctcatagagaaggatcagatgcttcagtggaagccatggttgctcaagtcgaaaaacacccaatttcatcgatccttatcatcattgctatgcaaacagaagctttgccggtggtgaataagttccagttgattgaaaaccctta

SEQ ID NO: 51678 - DNA, 303 bp, Gossypium hirsutum
  Clone ID: LIB3197-044-Q1-M1-B7
tcgagatattagagatgaatcccgaagacgaggcagaggaagatggtgccaacattgatcttgattcacagaggaagggtaaatgtgttgtactgaaaacctcaactcgtcagaccatctttctacctgtggtcggacttgttgaccctgataaattgaagcctggtgatttggttggcgtcaataaagacagctacttgatattggatactctgccatctgaatacgactctcgagtaaaggctatggaagttgatgagaaaccaaccgaggattacaatgacattggtgggttggaaaagc

SEQ ID NO: 51679 - DNA, 313 bp, Gossypium hirsutum
  Clone ID: LIB3197-044-Q1-M1-B8
ggccatcctatcaacccagaactattcttagggttggaacaaaccaaagcaagctctttgctatcaaagccggatcatgagaagttgcatcggaagcttatatttgattctgctaatgagattcttgttggaaagttagctcaagtcagagcttctccggagccttggttaaatcctggaaagctcacaacgaagaccctcaatgcacaaaagcttctaaaggaactatgcatggagatagagcaacttcaaccgaagaaatcagacaacaacatggaggaagaagatggtctgaaaaacatattgtgggaaa

SEQ ID NO: 51680 - DNA, 403 bp, Gossypium hirsutum
  Clone ID: LIB3197-044-Q1-M1-C10
ctaatagccctaaaagtaaagcttatgttctggtggtgctgcttctttcttctcttatacttcattatttttcctttttcttcttttttgtgaaaaaacattgaaactcttttcaagacgcaatataagatgtgtggaggtgcaatcatttccgatttcattgccgtgaaacgcggtcggaatttaactgccgaggatctttggtctgaacttgacacattctccgacctgttgggtctggattacgggaatggaaaagagtcttttttcactcagttctacaacaccaaggccggttccaaagccaataaccttgaaaaagtggatacgagacgactcaaaagaacagcccggggagaaaaaaagaaaggaaaactcaacgaactttaaagaacatttacag

SEQ ID NO: 51681 - DNA, 347 bp, Gossypium hirsutum
  Clone ID: LIB3197-044-Q1-M1-C11
ggtagtcctgctcctgcccccacgatgtccaattcagagactgctgctactaacggatcgttaatggacccacagagacatcaggcgccggcagccaatggttcacttgccgttaaaaagcctcccaccaaagaccgtcacagcaaagttgatggtcgtgggagaaggatcaggatgcccatcatttgcgccgctcgtgttttccagttgacccgcgaattgggtcataagtccgatggtcagactatcgagtggctgttgcgtcaggctgagccttctattatagccgccactggtacagggacgactcctgctagtttttccaccgtgtcggtttccctccgcgg

SEQ ID NO: 51682 - DNA, 436 bp, Gossypium hirsutum
  Clone ID: LIB3197-044-Q1-M1-C12
ccttattccatatattcatcagctttcttcttggtgttgttaattgcaattcgaagcgtgaggaaatctaaagctaggagtttaactcaaaggttgattccagggccacggaaattacctttgatcggaaatctgcaccagctcgctgattctactctaccccatcgcaccctgcgtgacttggctacgaaatatggcgccgtcatgcacctgcaactcagtcaagtttcaactgtggtcatttcttctgcagaaatggctgaagagattatgaaaacacatgatattgtctttgcttctaggcctttacttcttgcggccaagattataacttatgaatgcactgatattgtcttttcaccatatggaaagtattggagaaatctgcggaaaatttgtacatcggaacttctgagtgcgtctcgggtcgcctcct

SEQ ID NO: 51683 - DNA, 381 bp, Gossypium hirsutum
  Clone ID: LIB3197-044-Q1-M1-C2
cccccccccctttttttttttttttttttttggtggggttttaaatctaacatgtttgggtttgttttttaactcatgacgttaagcaaagattacaactttctacagcagtccattggccatacttaaaaaacaaatttcagttaatttacccccagaattttctatctctaagacaacatcgaaaatcgaaacaattctgacttattacccatagtttgagccataaacagagccataccctcccgcatgtccgggattggatggtggcgaatcatataccgaactatgagctgcataaggattataagcttggtctgcaaccccacctgcttgtgcctgagctggagccggaacagcttcagccatgaaattctgtat

SEQ ID NO: 51684 - DNA, 391 bp, Gossypium hirsutum
  Clone ID: LIB3197-044-Q1-M1-C3
aacagaagccagcttgaaactcactgatgatggcatcgcatccccacttcatatcgtatttatttctttgataatcactttcgatttgcctagataagatcaaaactcgcatttaaagcagatctctcttacactctctcttgttcaatttctttatatgatttaacttcacaacacacttgtcactcaaaaatcacaaaaactcagtgaactcagtgaagttactatataaaaaaaaatcatgcccatgttttattatgttgaatttagtgtttagtgtgaaggtgattgtggcttgaaaacagtattcataaaaggaacaaaaaaaaaaagatggggagggcaccatgttgtgacaagaaggggttaaagaaagggccatgggcacctg

SEQ ID NO: 51685 - DNA, 376 bp, Gossypium hirsutum
  Clone ID: LIB3197-044-Q1-M1-C4
aacagcttcaggaacgtctgctgctggctatccatgaagctagtgaagggtttggctttggatgaacagagtttgtattacgatgaagtcaatgtccctgcaatgccggcagtccatttaaagatctatattgaatataagctttttcattaaatttcggttggcgaagagaacgtagtaatgccgacaatgggatatggcatgctcaaaacgatgtacaaatggaggggaaggttggttgtgctgcctttataatttcaaaagtggagagcttatattctacacaaacactgaagaggataaaagatgatatttttttgaagtaaattgaataagggatctttatcctatggataatatattgatctaataatgg

SEQ ID NO: 51686 - DNA, 70 bp, Gossypium hirsutum
  Clone ID: LIB3197-044-Q1-M1-C5
gtctgtcatggaccttcattcaccagtggtgagaatctctaattgtatcatcgccttttgcccaccacta

SEQ ID NO: 51687 - DNA, 435 bp, Gossypium hirsutum
  Clone ID: LIB3197-044-Q1-M1-C6
gaaaaacccaatcccaacttgtttcttcatggcgtctccttcgctcttacagtccacatcctcctcgttccacggcccctcccctttccttgcaccaccattctccgcgcgcctgccctacgctaaccccagaaatggatacgccggcgtcgtttcggtgagggcaacgggagagattgtgttggtggataaatcggaagccgaaaaaccctaccgtctcaaaactacttacctagacaaaattattcctttgcttaaagaagagttcaagtacaccaatattcaccaggttccaaagcttgaaaagattgtggtgaattgtgggattggagatgctgcccagaacgcgaaaggcttggaagccgcaatgaacgagatggcattgataacggggcaaagacctgtgaagacgcgagccaggaattctattgctac

SEQ ID NO: 51688 - DNA, 429 bp, Gossypium hirsutum
  Clone ID: LIB3197-044-Q1-M1-C7
gaagaaatgccttgttttgccgatcttggttgcgggccgtcgatgaattgaagggaattttgatcattatacacggcttgaatgagcatagtggaaggtatactcaatttgctaagcaactaacttcttgccgctatggtgtatatgccatggactggataggtcatggtggtagcgatggattgcatggatatgttccttcacttgatcatgttgttgcagataccgcgtttttcttggaaaagatcaaaacagagaacccaggtgtaccttgcttcctttttggacactcaactggtggagctgtggttctaaaagcagcttcatattctcatattgaagaaatggtggagggaattgggctgacattttcaaccctgcgtgttaagccagcacatcccattgttagggctgttgctcccctttttt

SEQ ID NO: 51689 - DNA, 340 bp, Gossypium hirsutum
  Clone ID: LIB3197-044-Q1-M1-C8
agcaaagttaaaccccattcaacattcacatgtaagcttctttttttttctttctctaattcatttacagtcatcaagatctatttagtttctactactgggttttcaaaaacaagcaaaaccccattatttagtgatcaaattctgtttgtttggttgacttattttgagatctgattagtttttgaaattgggttttgaaaaatgaggaaacccacaaaagaatcagagttaaacactgagccaatcggtcaaaatctgatcaaattgattagtaatctcttgttctctgtttttgtgttgtcggttcttatatttacagccatttgctatcacttat

SEQ ID NO: 51690 - DNA, 273 bp, Gossypium hirsutum
  Clone ID: LIB3197-044-Q1-M1-C9
ttcctttccatccaaacaacaggctctctttgccgtctctgcatttacgttctatttttttttagatttatttttttaaaaaaaactaaagggatttgagttcgtctggatttgaagtactttcttgagcatatatggatcgtgctgaactatccactgaacaggttctgaagagggacatcccatgggaaacatacatgacaactaagctgatttcacgaacaggcttgcagctgttaaggcgttatgataatagaactgaaagtgtcaagg

SEQ ID NO: 51691 - DNA, 348 bp, Gossypium hirsutum
  Clone ID: LIB3197-044-Q1-M1-D10
attttcagaaacagaagctaagaactctgaacacctgatcttcctttcccctttcccttctcccatccttgacacccagatcttctgcttgtcgtcagccaacaatgattctcaacactagacgtcagtgttcatcgttgattttcctcatcttcacctttcattttcaaaatggttactgcaccaccaatcggcatatatatttggagtcaccctctacatctgcatccatcttttccatttcactgaaaattaaaccctagaattttgatttgaatcgctccgagacagccaaggggcagattgatggtttacatcctgtgctgtgatggaggtagtcgggtcatg

SEQ ID NO: 51692 - DNA, 433 bp, Gossypium hirsutum
  Clone ID: LIB3197-044-Q1-M1-D11
cgcatatcctgagacgacaagtgagtcagatcctttcccatgtgagccctaactctaatcctacctcgtatttctctttagctagacctttctcttcggccaccgacaccattcgagccactctcttccccggcgatggcatcggccccgagatcgctgagtccgtcaaacaggtttttagaactgctgaagtgccaattgaatgggaagaacattatgttggggaccaagttgatccaagaactcaaagttttctaacttgggaaagtctcgaatcagtaagaaagaatcgggtaggcttgaaaggtccaatggctactcctattggtaaagggcatcggtctttgaatcttactctaaggaaagaacttaatctgtatgccaacgtcaggccttgttacagttctccggttataagactcggtatgatgat

SEQ ID NO: 51693 - DNA, 413 bp, Gossypium hirsutum
  Clone ID: LIB3197-044-Q1-M1-D12
gtcggccacaaatctccgctccgtttaccgatatctgaaaaatgtccggccaaagccagcgcttgaatgtggttccaactgttacaatgcttggaatcatgaaagctcggcttgtgggcgctacaagaggtcacgcacttctcaagaagaagagtgatgccctaaccgtacaatttcgtcagattcttaagaagatagtgtctacgaaagagtcaatgggagagattatgaaaacctcctcattttccctaacagaggctaagtatgttgctggtgagaacatcaaacacgtcgtgcttgaaagtgttcaaactgcttctcttaaagttcgatcgcgacaagagaatgttgctggagtgaagcttccaaagtttgagtattttactgaaggtgagaccaaaaatgatttgact

SEQ ID NO: 51694 - DNA, 419 bp, Gossypium hirsutum
  Clone ID: LIB3197-044-Q1-M1-D2
ctgcattttcaacccaaaattttttttaaaaaaaattctaaataagtgatggggtttccggccaatggctcatcggacaaaccattgaagttcctgatctacggtcgaactggttggatcggtggtttattaggcaaactctgcgaatcccagggaatcgattacgagtacggctccggccgtttagagagccggatttcgcttgagtccgacatagccaacgtgaaaccgacccatgtattcaatgccgccggtgtcaccggtcgtccgaacgtcgattggtgcgaatcccataaggtggagaccatcagaaccaatgtggtcgggacccttaccctcgctgacgtctgcagagacaaaggcctcatcttgattaattatgctacaggttgcatctttgagtacgatgaggctcatca

SEQ ID NO: 51695 - DNA, 361 bp, Gossypium hirsutum
  Clone ID: LIB3197-044-Q1-M1-D3
cggacgcgtgggctttcttcttcttcttattcctttattgctttttagaatttttcttaatcgaaaatgagagagtgcatttcgatccacatcggtcaggccggtatccaggtcggaaacgcttgctgggagctttactgtctcgagcatggaatccagcctgatggtcagatgccaagtgacaaaactgtcggaggaggtgatgatgcttttaacacctttttcagtgaaactggtgctgggaagcacgtccctcgtgccgtcttcgtggatcttgaacccactgttattgatgaagtgagaactggtgcttaccgccagctcttccacccagaacaactcatcagcggcaaggaagacg

SEQ ID NO: 51696 - DNA, 263 bp, Gossypium hirsutum
  Clone ID: LIB3197-044-Q1-M1-D4
gatactcggctgactctgcttttctctgtacgggctgtctgccaattccactatcccctataccatgcttgacacccagatcaaatggagaagatgatggcgcaatgatccgtatactatagcacgaagttgtaaatcgtcccgttttacccccatcgccgtcacggccgccgtcaaccacaatcgccacttggtttcccggagtttcttctctatctcatcgcctatcgcccctaatccgtctataaacaccccttctggtg

SEQ ID NO: 51697 - DNA, 437 bp, Gossypium hirsutum
  Clone ID: LIB3197-044-Q1-M1-D5
acgcaagcaaaaaatttaaagtttgatagtactttattttgataaaaatacaatgccgatttctcgaattgcagtcgggtctccggccgaagccggccaagcagatgcactcaaggcggctttagccgagttcatttcagtccttatttttgttttcgccggtgaaggctcgggcatggctttcaacaagttgaccgacgatgactcgtcgacaccagcgggtttagtagctgcggcattggctcacgccttggcgttgtttgtggcggtttcggtcggagctaacatttccggcgggcacgtaaaccccgccgtcacgttcggtgctttcgtgggtggccacattacattggtgaggagtattttgtattggatagctcaattgcttggatctgtcgttgcttgcttgcttctcaagttctcaaccggcggaatga

SEQ ID NO: 51698 - DNA, 435 bp, Gossypium hirsutum
  Clone ID: LIB3197-044-Q1-M1-D6
gaaacaatggcgaccaatttgatccgtcgagcgatgaacatgacgccacgtttgccgtcatcgaaagtggctccagcatcgcggctggtgttggaccgtccttacgccaccgaaacggaagctcaaaaggtggaaccgaaagcctcctccggcagcggcggcgccaacatgaaaaccttccaaatctatcgatggaacccagataatcctacgaaaccccaacttcaagacttcaaaatcaacttaaaagaatgcggacccatggtgcttgatgccttgatcaagatcaagaacgagatggatccatcgctcaccttccgtcgttcctgccgtgaagggatttgtggctcttgtgcaatgaacatcaacggttgtaacgggttagcatgtcttaccaagatcgaatctggaccatcggaaacgacgatcacgccg

SEQ ID NO: 51699 - DNA, 333 bp, Gossypium hirsutum
  Clone ID: LIB3197-044-Q1-M1-D7
gaaagaggaaaacaaagccatttttagtggttgcgctctctctccctctctctaaagaagaggcattcccttcgtcggagtgcgcttctgctgagtgtttctttcgttttcttttgtttaaagttttggagtaaagagtgtttcaagctttttagtcatattggctgcttaacgacccaaggtagcctcgccggatataggtgctcatcataaaaaatgactgtcacgccaggaatttccatcaacgatgggaaccttgtggttcatgggaagaccatcctcactggaatgcctgataacatagttttgaccccaagatccggtgtcgggctt

SEQ ID NO: 51700 - DNA, 420 bp, Gossypium hirsutum
  Clone ID: LIB3197-044-Q1-M1-D8
gttctacctattctgcttctccttctgaggcggctgccaaagttattctttccattgacccgcgtgtttccagtgatgataatgactcctcttctgctcagttcaccatggaattggttggcacagaaaccggggatgtaccgaagcgctattccatggatatgaccaaagactctgctccaatgtctgtgttgtctgagactctccaaagaaagcttgacggtgacggaaaaatactgaacaagtttgacatgagacctcatgatgaaaacatcgaaaactatgggaaactttgacgtgaaaagacaaatcagtctatgaacaaatccagacagatacaggtcatcgacaatgatcatgggactcacatgagggctatgcccagggttattaatggtgctgtattcaataatatattta

SEQ ID NO: 51701 - DNA, 383 bp, Gossypium hirsutum
  Clone ID: LIB3197-044-Q1-M1-D9
gtgattttggagtatcaaacaccggtcaacagctcgaaaccggatgaatgtgatgttgcttggaggtttcggaataaaaaggaaagatcttggagaaagtacagagattttagaaggttcgagttcgggatcggagtgaattgtacttacagagtgatccatacaggccgttggcattcgggaatcaacgctcgacgaccttggattcggcctaacccaaagttcactcaaccgatacgtgatgaagagataaacgatacaatcccgactttaccggaaacgaactttaggaaaaggaagtatttgtattatgcaagaggaagagattattgtaagggaatgaaccattacttaatgagtttcttatgtggtttaagggaagc

SEQ ID NO: 51702 - DNA, 380 bp, Gossypium hirsutum
  Clone ID: LIB3197-044-Q1-M1-E1
gtgccatttcgtggtttaagggatttttttcattcggtgtcttctcacgctcgattaccttacaaaaagagaaaatgaccaagtgttacccaactgtgagcgaggaataccagaagtcagttgaaaaggccaagaggaagctcagaggtctcatcgctgagaagaactgtgctccactcatgctccgtttagcgtggcactcagctggaacttttgatgttaagaccaagaccggaggtccattcggaaccatgaagcatcctgctgagctcgcacatgctgctaacaacggcctagatatcgccgtcagacttctcgagccgatcaaggagcagtttcctaacctcacctacgctgacttctatcagcttgctggtgtc

SEQ ID NO: 51703 - DNA, 406 bp, Gossypium hirsutum
  Clone ID: LIB3197-044-Q1-M1-E10
cacactatttagacctaaagccagtaattcggatcaccggcggccaagccttgattcttcgagacggagtatagatgtcggggccactcgatcgattcgctcggccttgctttgaggggttttatggtagtgatgagaggagagagaggaaatctgatttcgagaactcagaggatgaaaggcgcacaagaattggatccttgaaaaagaaagcaataagtgcatctgctagatttaagcattctcttaaaaagaagagtaatagaaggaaaagtgatggccgtgtcagctctgtatccattgaggatgttcgcaatgctgaagagctacgggcttgtgatcaatttcgacaagcattaatcatggaagaactgcttcccgaaaaacacgacgactatcacatgat

SEQ ID NO: 51704 - DNA, 370 bp, Gossypium hirsutum
  Clone ID: LIB3197-044-Q1-M1-E11
atcatcactctcccaccccgaccgcttgattgtgatcagacggtaatcatgccgatcagaaacatagccgttggccggcctgaagaagctactcatccagatgctcttaaagcagctttagctgagttcatatcaacgttaatcttcgtttttgctggatctggttcaggcatggcttttaataagctgaccgacggcggtgcaacaactccggctggtctcgttgccgcctctctagctcacggatttgcgcttttcgtcgctgtctcagtcggtgctaacatctccggtggccatgtgaatcccgccgttacattcggtgctttcgttggcgggaacattactcttttaacgggtatcctttattgga

SEQ ID NO: 51705 - DNA, 388 bp, Gossypium hirsutum
  Clone ID: LIB3197-044-Q1-M1-E12
ggaaaaagccacgtcaagccgggtaagttgataggaagaaaagagtgtccgttggtcacatttgatctcccctacctggctttctattataaccagaagctgctgttttacaagaacgacggtggtggtgagttcgaggacaaggttgaaaagctcaaggaagggctgagggtggtgttagaggagttttatcagctaggaggtaagctcgggaaagatgacgatggggttcttagagttgattatgacgatgatatggatggggttgaagtggtggaagccgtggcagaggggattaccgtcgatgaattgaccggtgatgatggtacgagctcatttaaggaattgataccttttaatggcgtcttgaacttggagggtcttcaca

SEQ ID NO: 51706 - DNA, 411 bp, Gossypium hirsutum
  Clone ID: LIB3197-044-Q1-M1-E2
gaagagccctatcacaagcctctgaacaatcatggagatcattccatgactgattctgcgcaaagcttggagactcaaggtgaaattgctgatgaccccgatgaatactgcaaagaggtccaatgtattgacacggaaggatcaggcagggataataataattctgaatctcttgccgtaccaaatggtgaaagtgaaggacgattggcattgacattaaatggagttggagatgtggctggccaggaaacaatgtctaccccaatgaatggagatagagaagcaaatcgtattcaaaatagcctgaagttgagtaggagctggagttgtagagatgatgtcacgggtggtacatcttctccatatatggacggagaacataatgaaagcaccccgcctaatgggttagag

SEQ ID NO: 51707 - DNA, 357 bp, Gossypium hirsutum
  Clone ID: LIB3197-044-Q1-M1-E3
ctttcatagttgcgttccattttccctaacaaagctgcgtcagatccgatcaggtttaactcagatccatctgtctcgggtcttctaaataccagatctttactattctcgagtaaaggaagaaagaggaagggagagatgagacagattattagcgtccacattggccacgctgggattcaggctgggaatacatgctgggagctttactgtctggaacatgaaatccaccctgacggaacaatgccgagcgacacctgtatgggcgtggcacacgatgctttcaacactttcttcagcgaaacggtgtcagcaaagcatgtgcctagagctgtctttgttgatctggaacccact

SEQ ID NO: 51708 - DNA, 418 bp, Gossypium hirsutum
  unsure (1)..(418): unsure at all n locations; Clone ID: LIB3197-044-Q1-M1-E4
tggagaacgaaaggaaagacaataaaaggaggaagggaggaaaaaagaaagactaaaaaaaaaaacaacaaacagaagctaacagaataacaaacagtaaagagtaaaaaaaaagaaaaaagaaaaagaaaaaaaaaaaaaggaaaagaagaatcagaaaataagaaacaaaaaaaagaaaaagcataataaaagaacggatgaaggaaataggataaaaaacaaagctgaaaaaaagaaaaaagaaagagaagataagaaaaaaagtaaaaaagaatagaaagtagaaaaagaaaataaagaagaaaaaatggataaaaacaggaaaagtaaaaaaaaaaaaaaaaaaaagtgaaaaaaagattgagagaaagtncaaaagagaagaaaggaaaaaaactaaaaaaagggctttcac

SEQ ID NO: 51709 - DNA, 432 bp, Gossypium hirsutum
  Clone ID: LIB3197-044-Q1-M1-E5
ttcctttccatccaaacaacaggctctctttcccgtctctgcatttacgttctatttttttttagatttatttttttaaaaaaaactaaagggatttgagttcgtctggatttgaagtactttcttgagcatatatggatcgtgctgaactatccactgaacaggttctgaagagggacatcccatgggaaacatacatgacaactaagctgatttcaggaacaggcttgcagctgttaaggcgttatgataatagagctgaaagtgtcagggcacagttgttggatgatgatggtccagcctatgttcaagtgtttgttaacatcttacgggatatctttaaagaagaaacagcggaatatgttctggctctaattgatgaaatgcttacagccaatccgaaacgagccagactatttcatgacaagtctc

SEQ ID NO: 51710 - DNA, 411 bp, Gossypium hirsutum
  Clone ID: LIB3197-044-Q1-M1-E6
gataaatcgttcctctattggccctttgccttcttgttactctccatccttgaaaacacttatcaagggcatgctaagaaagaatccagagcaccgaccaagtgcatcagagcttttgaagcacccttatctgcagccgtatgttgatcagtatcgttcatccttcagctacccttcaacaaattgctccttggataagcatatttccactggtcgtgaatctcgtgataataggaaaaatatggccgagagtcacagcagtaatagctcatgcagtgataaagatagtttactttcaagtgacagaaacactgccacaatggtttcaaatagcaatagtaaggccactgacagagattcaatttctaatgatgaggaaggaagcactgagcagcacctgccaagtaaaag

SEQ ID NO: 51711 - DNA, 387 bp, Gossypium hirsutum
  Clone ID: LIB3197-044-Q1-M1-E7
cccacgcgtccgctcacctggcattggttcatgtttcttttcactcttcctatcgctgcttatcatctcatgttgtacttgaatcggaagcatcttcttgatgtcactgagattttcagagatcttaatactgagaagaaatatcgttttatcaagttggccctttacttattgctcttcactgtagttttgttcaggctagtaatatctgcgttcaactctttacatgatgaagttgatgtgcatgcattttgattacttggcagtgtggtagttggtatttgtaagtctgtgttgaaagtgaaacctagctaactggagtagatgtaccaaaagttgatagtttgattagtttactgaatgggtttttacttcggctgattgatg

SEQ ID NO: 51712 - DNA, 389 bp, Gossypium hirsutum
  Clone ID: LIB3197-044-Q1-M1-E8
gaaaatatctcaaatctcctcctcctcctcggaaatcttagtatcatcaccatggcctcaaatcccaaggtcttctttgacatgactatcggtggtcagcccgctggtcggattgtgatggagcttttcgcagattgcactcctcgcactgctgagaacttccgtgccctctgtaccggcgagaaaggcgtcggccgcagcggtaagcccctccactacaaaggctcctctttccatcgtgtgatccctaactttatgtgccaaggaggtgacttcaccgccggaaacggtaccggaagtgaatccatctacggatccaagttcgctgacgagaacttcatcaagaagcacactggtcccggtattctctcaatggctaacgcttgtcc

SEQ ID NO: 51713 - DNA, 423 bp, Gossypium hirsutum
  Clone ID: LIB3197-044-Q1-M1-E9
gtctggtgaaattcagggaactttcaatggcagtgctttacagatgctttggctgaataatcaactgcatggagggatgactggtccaatcgatgttgtggcaacaatggagtccctcacagttttatggctgcacgggaaccacttcactggaacaatcccagagagaattggtaagttaactctcttgaaggatctcaatcttaatagtaacaaacttgttggcctaattcctattagtttagcaaatatgagactgcaaaacttagatttaaacaataatcacttgatgggtccaattccaatgttcaaagcatcaaaggtaacttttgcttcaaacaagttctgtcaagccactcaggggcttctttgctccccagaagttatggcacttaatagagtttcttggagtggtgaattacc

SEQ ID NO: 51714 - DNA, 380 bp, Gossypium hirsutum
  Clone ID: LIB3197-044-Q1-M1-F1
ctcgaagctcgttagggttttcgccgatctatcgcggaattactcggatctcattaacaaaccatcttatcgggctctgtttgaaactgattcactgtccatcgatgagtcggtgctccggcaattcgagaaagaagtgaaagagcgaatcaaggctacgcgccaaatgatttcggaagccaaggaatcttttgataaccaactcaagatccagaaattgaaagatacgatcttcgctgtcaacgagcagctgacaaaagcgaaaaagcaaggtgcgttttccagcctcatcgcggccaaatcaatccctaagagcttacattgtttggcaatgaggttgatggaggaacgtatcgcacatccagagaagtataccgatg

SEQ ID NO: 51715 - DNA, 318 bp, Gossypium hirsutum
  Clone ID: LIB3197-044-Q1-M1-F10
gcaatcgttgcgaagagccaaagatgccgaagaacaaaggaaagggaggaaagaaccgtaagaggggaaagaacgaggccgatgacgagaaacgtgagcttatcttcaaagaagatggccaagaatacgcccaagtctcacgcatgttgggtaacggccgctgcgaagctatgtgcatcgacggcaccaagcgcctctgccacatccgggggaagatgcacaagaaggtctggatcgccgccggcgacatcatcctcgtcggccttagggattatcaagatgacaaggctgacgtcatcttgaaatacatgcccgatg

SEQ ID NO: 51716 - DNA, 414 bp, Gossypium hirsutum
  Clone ID: LIB3197-044-Q1-M1-F11
cacgttgtgcttccaatagcttccaagtttgctcccgactttactataatatcagctggatttgatgctgctcgtggtgatcctttaggatgctgtgatgtgactcctgctggttatacacagatgacacacatgttgagtaccctctcgggtggaaagttgctagttgtacttgagggcggctacaacctccgttcgatatcatcttctgctactgcagtgattaaggtacttttgggtgaaagttgcgagtgtgaaccagagaacatcgttccttctaaagctggcctgcttacggtgttggaagtcctgaagattcagatgaagtactggccaaatctaagttcaagcttcgaaaaactgcagttgcaacgggcaatgtattctgtggagaagaaacaaaaacaagttaaa

SEQ ID NO: 51717 - DNA, 355 bp, Gossypium hirsutum
  unsure (1)..(355): unsure at all n locations; Clone ID: LIB3197-044-Q1-M1-F12
gaaagaagagagagcctgcacaattgaggatttttaatttggggaatacttcgcctgtacctgtgagtaggctggttagtatattggagaagattttaaaggtgaaggctaagaagaaagtagtgccactaccaagaaatggggatgtggagtttacacacgccaatattaccttagcaatgacggagctcggttacaagccaacgactgatttggaggcagggttgaagaagtttgtgagatggtacctcagtttttattcggggtcaaagaagaagagttcttggtgaaactttctcaatctttttttttattattattatttctctcattttagntcatattgattacttct

SEQ ID NO: 51718 - DNA, 438 bp, Gossypium hirsutum
  Clone ID: LIB3197-044-Q1-M1-F2
ctttaatttaaaaactcaaaaaacagagtgaataaataaaaaacaaacccaccaaacaaaagaagaaagaagcagcagctcacaagaaaggtagaaagcaaagaagaaacaactacagcaccgcacctcacaatacaaagagaaagaaggaatcaagatattaaatcatagccaaaaccccagaaattacaaaagagtgttttgaaattgcaatggcagcgctcaattcttgtaagcttgtttggatctgcgccgtgatcgtggcggcggcgttgatggtggcagttgatgcgagtggtgcccaccactaccacaaccagcaaatcctgggttggattccgacccccaccagatcttcttgcaagggttccataggggaatgcttaggaggggaagaagagtttgagctggactcggagatcagccgccgcgttttgc

SEQ ID NO: 51719 - DNA, 374 bp, Gossypium hirsutum
  Clone ID: LIB3197-044-Q1-M1-F3
cggacgcgtgggttgaatttgaaaagaaaagagggagaaaaagaagaagaagagagtttgataatctgattgtttcagagcaaaaataaagaaggttgtatacaatatataatataaccttccgggctcttttttcctttttctgtttggatagaaggaaagtaagatgatggtatacaaaaagagagaggcggttgaagaagtggcaatatatggaggattgataggggtgcaatttgtttatgcaggcaactcaattttacttggttatcttatgtcccttggccttagccttttcaccattgttattttcttcacttttgccaccttcattattgtctctccttttgctctttatttcgagaggagcaatt

SEQ ID NO: 51720 - DNA, 431 bp, Gossypium hirsutum
  Clone ID: LIB3197-044-Q1-M1-F4
ctcagcttctctttctctgtttcgactctgtggagtaaatttggaatcgatggcggccttgcagtacctagactctcttcgaaatgagcatccagagctaggcgactggtataattctcttgcagatctgtatcaaaagaagctctggcaccagctcactctcaagcttgagcagttcgttgctctcaccgttttccaggctggagatgcgttgataaagttgtatcataactttatcactgactttgagatgaagattaatcctctcaagcttgcacatttcgctgttatagtttctcagcagtactcagagaaagaggctgctattagtttcctgaaggggtgattgaaaagcttcaggctactaaagagcagcgcatagaagagccaattctttatattaagatgcagatttccaaattcaagcttga

SEQ ID NO: 51721 - DNA, 410 bp, Gossypium hirsutum
  Clone ID: LIB3197-044-Q1-M1-F5
ctcaatgatgtctacaacacacttgctagtattcctacttggagtggtgactctcaccactcccacatttggtacctatgagtcaccaaattatgggaaaccccctactcctgtattcaagcctcccaaggtgaaaccaccaccatatgaacctaagccaccagtgtatgaaccaccaaaaaaggagaagcctgaacctaagccaccggtttatgcacctccaaagaaagagaagcatggacccagaccaccaatggatgaacctacaaagaatgagaagcctgtaccaaagccaccagttcatacacctccaaagaaagaggagcctaaacctaaaccaccagtatatgaacctccaaagaaggagaaacctgagccaaaaccaccgatttatacaccttcaaagaaag

SEQ ID NO: 51722 - DNA, 279 bp, Gossypium hirsutum
  Clone ID: LIB3197-044-Q1-M1-F6
aaaaagctttatgctaaagcgatgaccgcatcttaggggcctaaatggatcttctcaaagaagagcttctcaagaagcggcatagcttatctcaggaaaccggcggcaggcgcgtatttaaacgctcctagattgaacaaaatcaaattctgaagcttacccagcactatattacctttttttaatctgtattttgtttttaatctacctcttttttttattcattcgttctataattccgtgtaaatagtaccttacctattttttttatttctaatt

SEQ ID NO: 51723 - DNA, 329 bp, Gossypium hirsutum
  Clone ID: LIB3197-044-Q1-M1-F7
ctctgaaaactaattgaaatcgtcggctgtctctcatttctgttcctctcgggcttccgccgccgtcgacacccaaaatggaggctcaccggctatcttctactaaacctgttcaagctctcaagccaacaaagaagatttctttagaggaagataccggtaaagcctccgacgcactgccgcttcccttgtacctaacgaatgccctgttcttcaccctcttcttctcggtggtttatttccttctttcccgttggcgtgagaagatccgtacctccacacctctccatgtcgtcaccttttcagagatcatcgccattctctcattt

SEQ ID NO: 51724 - DNA, 356 bp, Gossypium hirsutum
  Clone ID: LIB3197-044-Q1-M1-F8
ctttgctgttgaagtagtaatatctatagaagacggatatggagaggcaaagaagcaagcaggttcgtttgtcgatgtgggttttggttgctgccttgttctatcacaacatggtcattgcagtgacctccactggccttggatagcactaaaattactatccagtttctgaccctcatgctggaacttcctcttcatgttcacatggcacaccaccatctttaggaggcggaacaccttcctctcatggaaccccatcacatgtgatgcgttaccacacttcaccaacaccattcacgccttcaggtggaaattgcagaactccaacacatgacccttgaacttcatcaacacca

SEQ ID NO: 51725 - DNA, 324 bp, Gossypium hirsutum
  Clone ID: LIB3197-044-Q1-M1-F9
ccaatctgcagaagcaacaccctgatctcaagattgtggtttttgacatttacaaggcccttcttgatgttgttaataccccttcaaactatggtttcgtagaagcaacgagaggctgctgtggcacatggactgtagagacaactgaattcttatgcaatccggatacactgggaacttgtcccaatgcctcccaatatgtgttttgggacagtgttcattcatcggacgctgctaatcaggttcttgcagatacatagattgttcacggcattcccctgctttgattcgtcaggacaccgtgtttacttgcactttttaaac

SEQ ID NO: 51726 - DNA, 193 bp, Gossypium hirsutum
  Clone ID: LIB3197-044-Q1-M1-G1
gtgagcatatagagttacatgttatagttacagcttgtgtgagcatttcccaagcatctgatgttatttcattaggttcaacaggtggtaaaggtttaaaaaaatatgtacatatatgaaatgttatatggtcaagatatgtgaattggaagatgttgataaaaatacttgaaataataaactatgtttatcg

SEQ ID NO: 51727 - DNA, 434 bp, Gossypium hirsutum
  Clone ID: LIB3197-044-Q1-M1-G10
gaaaaaaattagtgaattttgactggattggtcttggatccaaatttttggagattacagagaaagaaagattgatttgaaaatacacaataggaataatcgcgatgggtttcaagatatttgtggtggcgttgatggtgggtttcatcgcagcggctcagatttcattagcatccaccgtgcctgcttttctatgggctcctggtttctctagcgttgaatcgaaggaatctgtaaattatcagatcatgtctccaaaggatctagctaactctgttctttctcaagggggatggtctgacttactgtgctccgagaggaaaaatgagcgccctgttgatctcgccgttgtttttgttggtagagagttgcactcttcagatgttgcagggaacatacatgcagatccggctcttttgaacttgcttaaggac

SEQ ID NO: 51728 - DNA, 465 bp, Gossypium hirsutum
  Clone ID: LIB3197-044-Q1-M1-G11
agctggccgcctgcacggcccggactactggctggacacccatcctgatatctttgtctgctatggtgatcaacaaatacacgctgaggagtaacattaagagctttaatctttcgggaatggggtgcagtgcggggcttatctccattgatttagctcgggatcttctccaagtacacccgaattctaatgcagttgttgtcagcacagagatcatcactcccaactactaccaggggaatgaaagagctatgctccttcccaactgtctcttccgcatgggtggcgcagcaatcctgttgtcgaaccgccgctcatagaggcggagagccaagtaccgacttgtccacgttgttcgaacccacaaaggggccgatgacaaagcctaccgatgcgtgtttgaaagaagaagacaaagacggcaaaagtgggatatcattatctaaagatctcattgctatagct

SEQ ID NO: 51729 - DNA, 439 bp, Gossypium hirsutum
  unsure (1)..(439): unsure at all n locations; Clone ID: LIB3197-044-Q1-M1-G2
cccacgcgtccggaaaaatggccaccattgatgttcctgagcaggtttcagttcttgcagatgcagaagctcttagaaaggcttgtaaaggatgggggacagatgagaaggcaataatttcagtgttgggtcacagaaatgcagttcaaaggaagcaaatcaggcttgcttatgaagatctttaccaggaagatctcatcaagcgtcttgaatcagagctttctggtgatttcgagaaagcagtgtatcgttgggtattggatccagcagatcgagatgctgtgttagctaatgttgccataaagaaattaagccctgatcaccatgtgatcgttgaaatttcatgcaccagatcccctgaagagctcttggctgtgaggagaagcttatcangctcgatacaagcattccctggaagaagatgtggctgctcatacca

SEQ ID NO: 51730 - DNA, 380 bp, Gossypium hirsutum
  Clone ID: LIB3197-044-Q1-M1-G3
gcgagaaatttttggggcctcttgggcacatgtgggggggaaaatatatgctggaatcggtctttttatcaccaactataaaatttcggtattttcagggataaaaaaatcaaaacccccaggtgaagaaagtgaaaaccagcagcggcaaaggcaataaaatgtgaagccaaagagagagagatatatacataataaaaaagacttttcaaaaaaacacaactatggctcctcatacagaaggatcagatgcttcagtggaagccatggttgctcaagtcgaaaaacacccaatttcatcgaaccttatcatcattgctatgcaaacagaacctttgcccgtggtgaataaattccaattgatttaaaaccctcattct

SEQ ID NO: 51731 - DNA, 443 bp, Gossypium hirsutum
  Clone ID: LIB3197-044-Q1-M1-G4
gcgcttcaattcctcatttcaagggagagagtgtatcagtgtggcttcccctcttttacttaatttctctccgccatggctctctccgtcgagaaaaccgccgccggccgtgagtacaaggtcaaagacatgtctcaggctgacttcggtcgtctcgagatcgagttagctgaggttgaaatgcctggtttaatggcttgtagaaccgagttcggccctgcccaacctttcaaaggagccaaaattactggttctcttcacatgaccatccaaaccgccgttcttattgaaacccttaccgccctcggagctgaagtccgttggtgctcttgcaacattttctctacccaagaccacgctgccgctgccatcgctcgtgactccgccgctgttttcgcttggaaaggggagaccctccaggaatactggtggtgtactgagag

SEQ ID NO: 51732 - DNA, 422 bp, Gossypium hirsutum
  Clone ID: LIB3197-044-Q1-M1-G5
ccaaattcagacaagcaaccggaaaaaagtgtcagttgtttcagttttcagacaaggaaacaaagcaggaaaatcgggtcagaaaaaaaaatgagagttaactggaaatcatggtcacttaacaaggaccatcttgtgaagcttgcaattggcattctcttagtgggttttgcttttaagctcttggtttttcgttctaaaggatttggtgttgatttggaattccctgaggtagagaaagagtatgttcaaaaaccagatttgaaatctcctctccctgttcaaatacctgaaaatgatgatcaaatgcctctagatgttgttatagagaaatgtgatctctttacaggggattgggtgcccaatccctcaggtccgacctataccaacgggagctgtcccttgatagaagtcatcagaat

SEQ ID NO: 51733 - DNA, 425 bp, Gossypium hirsutum
  Clone ID: LIB3197-044-Q1-M1-G6
cttcaattcctcatttcaagggagagagtgtatcagtgtttcttcccctcttttacttaatttctctccgccatggctctctccgtcgagaaaaccgccgccggccgtgagtacaaggtcaaagacatgtctcatgctgacttcggtcgtctcgagatcgagttagctgaggttgaaatgcctggtttaatggcttgtagaaccgagttcggccctgcccaacctttcaaaggagccaaaattactggttctcttcacatgaccatccaaaccgccgttcttattgaaacccttaccgccctcggagctgaagtccgttggtgctcttgcaacattttctctacccaaaaccacgctgccgctgccatcgctcgtgactccgccgctgttttcgcttggaaaggggagaccctccaggaatactg

SEQ ID NO: 51734 - DNA, 386 bp, Gossypium hirsutum
  Clone ID: LIB3197-044-Q1-M1-G7
cccagaaagctcaaaggaaaaaaaagatggctttggagatctgtgtcaaggctgctgttggtgcccctaatgttcttggagactgtccattctcccagagagctcttcttactttggaggaaaagaagatttcctacaacatgcaccttatcaatatcagtgacaaacctcaatggtttttggagataagtccagaagggaaagtaccagtggtgaagtttgatgacaaatgggtggctgattctgatgtaattgttggaatccttgaagaaaaataccctcagccttgtctcaaaacccctcctcaatttgcctctgttggatcaaacatatttggaacttttgtcacatttttgaagagcaaagacgctaatgatggatctgag

SEQ ID NO: 51735 - DNA, 147 bp, Gossypium hirsutum
  Clone ID: LIB3197-044-Q1-M1-G8
acaatatacctgctcctgcaggtcattgcaggtgcttaacattcgctctgtctagctctatgcattataacaccatgtggactcgatattacatagcgggaacctcctatgtgcttattgtatagttatctactcacacacaccctt

SEQ ID NO: 51736 - DNA, 379 bp, Gossypium hirsutum
  Clone ID: LIB3197-044-Q1-M1-G9
ctctctcatggaccttcattcgaccaatggttgaaaatctttaaatgataacatcgtccttttgcccaccactatcaaatttccagattttccaggaaaaagaaaatcaaaacccccaggtgaagaaggtgaaaaccagcagcggcaaaggcaataaaaggtgaagccaaagagagagagatatatacataataaaaaagacttttcaaaagaacacaactatggctcctcatagagaaggatcagatgcttcagtggaagccatggttgctcaagtcgaaaaacacccaatttcatcgatccttatcatcattgctatgcaaacagaagctttggcggtggtgaataagttccagttgattgaaaaccctcattcttc

SEQ ID NO: 51737 - DNA, 327 bp, Gossypium hirsutum
  Clone ID: LIB3197-044-Q1-M1-H11
agaagagctctctctactccgaggacatctcagagatgccagcctatttaactccattgcttcaaaccggtagctgtgacgaccgaaactgagcctggtagcttcaatctacgtaaagccccgccaatgggtccgaacaataaccaccacccgccctccacctccaccttcactccgcctaactcggcgcatgactgcccttttctcaccctccacccattttagcaattcccttcttcccaaaaaaaacctacttcctcttgtgagatttgcctttcccaactgcttctcttcctcagcaaacaataaaggagctatcaacgggat

SEQ ID NO: 51738 - DNA, 75 bp, Gossypium hirsutum
  Clone ID: LIB3197-044-Q1-M1-H12
gattcaatgataagcttcctgttctcttgggaaaaattttggcaatcacaaactcttttctgcctacagatgacc

SEQ ID NO: 51739 - DNA, 444 bp, Gossypium hirsutum
  Clone ID: LIB3197-044-Q1-M1-H2
ggggggaccggcccgcattattgtttgaccaacccgtccgcccactcgtccggaaaagcaaacaaatgggaacacggggtgtgattgaacaagttggctgatatgagcaatgaggagttcagaaaagcttacttgtcaaaggtgaaaaagcccatcaacaaagggatatccctgtcaaggaacatgaggagaaaggtgcagtcttgtgatgcaccctcctccttggattggaggaactatggagttgtgactgctgtcaaggacacaatgttcttgtgaaagttgttgggcattctcattaaccggagccatggaaggaatcaatgccttacttactggagacctaattagcctttcaaaacaagaaccttgtgattgtgataccagcaactatgggtgtgaaagacgatacatggactatcccttcgagtgggttattaacat

SEQ ID NO: 51740 - DNA, 426 bp, Gossypium hirsutum
  Clone ID: LIB3197-044-Q1-M1-H3
tctatctgtcatttttccccccttcttcgtgtcgtcttttgaccttagattcttttttattcaaattgatgggattttttttgtttctaggattcgatttgggggattgagttttcgatattgatatgacatttttcttttccttttcggcaatttgtcattgtatgcgagtgattcaaccgttgggtctttgttgagctgaaatgaacaataaagttatacaagttacagaacaaacaagtttgacacaagttacagtgtgtgatgatgggaggaggaatttctattttcatatttgaatttgttttgggtttttggtaaagccaaaatttgagtgagataggtgggaaaaagaaagaaacggaaaatttgaccacagaatcgaacactgggtttcatcatgtggatgatttaacttctattatg

SEQ ID NO: 51741 - DNA, 374 bp, Gossypium hirsutum
  Clone ID: LIB3197-044-Q1-M1-H4
agcactgtcacaacagatgaggagagctcgaaggagtccatcaatggggggacaagatgagtggcttgatcgttggatgcctgctaaaccatggaatatcagaggaagagcttcactggatcaaagagataatgtcaaaactgtgcgaaatggacacttgacagccttattcatatgtagcaccaaattatagaagagcaacttgaaaccattatcaccaatggcctagttcacctctccatagggctcaacacaatgcacaagctttccacccttctgcacttacaccctgtccatcaaaaacacgtgcggttcaagtacggtctgcgagccctcgatgcgttatggtataccgaacctcgttttgatcatca

SEQ ID NO: 51742 - DNA, 355 bp, Gossypium hirsutum
  Clone ID: LIB3197-044-Q1-M1-H5
gcgaaactggtgccgggaagcacgtccctcgcgccatctttgttgatctggagcctactgttatcgatgaagtgaggactggtacgtaccgccagttgttccaccctgagcaactcatcagtggcaaagaagatgctgccaacaatttcgctcgtggccattatacaattggcaaagagattgttgatctctgcttggatcgtatccgaaaacttgctgataactgtactgggctccaaggcttcttggttttcaatgctgttggtggtggtactggttctggtcttggatctcttctcttggagcgtctctctgttgactatggaaagaagtcgaagcttggtttcactgtcta

SEQ ID NO: 51743 - DNA, 297 bp, Gossypium hirsutum
  Clone ID: LIB3197-044-Q1-M1-H6
agaaaagctctttctttggcagtgaaaattgaaaatcgacggccaatatgtcgacgctggcgtcaaaacggttgcttgggctaacgtcaagggagatcccgtcacggcccgttcagattctgccacgtctttaccacgaaaaggtcatcgaccactacaacaatccccgtaacgtcggttgcttcgataaaaacgatcccaacgttcgcacccggttggtcgggagctctgcttggggcgaatgtattaaaccttaaaataaaaatcgacgaagaattcggggaagaattgttgatg

SEQ ID NO: 51744 - DNA, 422 bp, Gossypium hirsutum
  Clone ID: LIB3197-044-Q1-M1-H7
atggaccctttggtattgaacaaggaactagtttctcaatgaacaaaggcaagatcgttggattccgtggcaggagtggttggtatttggatgcaattggagtgtattcaaagccagtactaaaactaaacccttcaaagcctattgttaatgcccaaagtttagctgctactgggcctgaaaaaagtggctattcagtgatccagggaagtgttggagaaagctacgacattgttctagctgtgaggcagagggatggatttgtgaatccccagccaagggaactcataaggcaaaattctagctctagtagctctgacgattcgagtgatgtagaagccaaaagcagggttccatttcggactcctatgaaagtccctccaaagttaccggaaggagtgttaacttatggaccctggggt

SEQ ID NO: 51745 - DNA, 360 bp, Gossypium hirsutum
  Clone ID: LIB3197-044-Q1-M1-H8
cttttctcccccaaaaactgttcttccctctgattttttgcctgaaatatcaagttctttgcttttgtttcttttcctctggttctttgttcctcttccgccggtgattcgcaagctcgattgttcaccctctctctattgaatttgcttctgggttccgaaccccaacgcatggattttgttaaaactgctttgtttaagaggcacagtaattacagcatttcagttgatgaaattggtatgaaattggatttcgtttgggcaccttatgtattgaatttaacccatttgttgacggatttcaagactaaaaagaaataccctaatgttatggtaatgggggctggtctatggcatatg

SEQ ID NO: 51746 - DNA, 421 bp, Gossypium hirsutum
  Clone ID: LIB3197-044-Q1-M1-H9
ctctctcatggaccttcattcgaccaatggttgaaaatctttaaatgataacatcgtccttttgcccaccactatcaaatttccagattttccaggaaaaagaaaatcaaaacccccaggtgaagaaggtgaaaaccagcagcggcaaaggcaataaaaggtgaagccaaagagagagagatatatacataataaaaaagacttttcaaaagaacacaactatggctcctcatagagaaggatcagatgcttcagtggaagccatggttgctcaagtcgaaaaacacccaatttcatcgatccttatcatcattgctatgcaaacagaagctttgccggtggtgaataagttccagttgattgaaaaccctcattcttcgtttccaaaaggggtcccttggatccattatcatggtgcata

SEQ ID NO: 51747 - DNA, 375 bp, Gossypium hirsutum
  Clone ID: LIB3197-045-Q1-M1-A1
acgggatatgctacgggtgaagatgggcaacaccggggggttggcaggacattactgttcatccacaaaaggatcttagtcaacgaacctttgttgaccaaacagccaattttgcggaccacaatgcgcaactttaaccatgtgtcccccatagctaagggggagcctccgtcgtatgccgcctacaagaaattcctccggcatcctatttatcaaactccaaaacccgcgatattcggatttcaaaggctcgcgccaatgagctttcatggcggcccaaaacgctaagaaggaagcctatcagctagcggtcaatctccaagtccgccttccccccgatggcttttcccaagcaatttcatactaaaagattct

SEQ ID NO: 51748 - DNA, 427 bp, Gossypium hirsutum
  Clone ID: LIB3197-045-Q1-M1-A10
ggagcttaagaggaagaggcattctttcactcccaaaatgtcagatcttcaagcaccccttcgcccaaagaggaagaagggcttggtggactttttggtccagtttcgttgggtttttgttatattttttgtccttcctttttcggctctgtattactttctcatatatcttggagatgtcagatccgagatgaagtcctacaagcagcgtcagaaggaacatgatgaaaatgttaagaaagtagtgaagcgtctcaaacagaggaatccaaaaaaggatggtcttgtatgcacagcccgcaaaccatggattgcggtggggatgcggaatgtagactataagagagctcgccattatgaagttgatttgtctgctttccgtaacattcttgaaattgatagagagagaatgattgcaagggttgag

SEQ ID NO: 51749 - DNA, 409 bp, Gossypium hirsutum
  Clone ID: LIB3197-045-Q1-M1-A11
gaactatattctctttctaaaaatacaacaaaatattaattaggatatatggcaggtgattcagggaagaaggaagagatgtcaaaggtgaaaatcatcagcacaagtcatgtgaagcctggaaagatgataggaagaaaagaatgtcaattggttacttttgatctcccatatttggcattctattataaccagaagctgttgttttacaagtgtggggagtttgaggcgaaggtggaaaaactcaaggatgggctgagagtggttttggaggagttttatcagctagcaggcaagcttggtaaagatgagaatggggttttcagggtggaatacgacgatgatatggacggtgtagaggtggtggaagccaccgccatggagatcggcatagaggaactggcgactg

SEQ ID NO: 51750 - DNA, 432 bp, Gossypium hirsutum
  Clone ID: LIB3197-045-Q1-M1-A12
gattgttttgagggtcaaacaaggagacaacccaacatttggcttcttaatgcctgatcatcgactgcatccctactttaggtttcttgttgatcaccaagaacttttaagcagcaattccattgatgaagagagcaaagccgacagttctcttgatcaggcaagtagtggtagagggggtggcgctttatctttgcttggcactgtctatggttccggagaagacgaggatggtgaaacggagaatgctaccaaagctaagagaatggaatctggggaatctggggttgctatcaataaaaagtcaactgacggatcagatcagaaagaatcttctttaagtgttagtagaaaagatgatactgtaactaaacatttggcccctttgaaggaaaaggcttctctaataaaacgaaatcaatctataacatc

SEQ ID NO: 51751 - DNA, 427 bp, Gossypium hirsutum
  Clone ID: LIB3197-045-Q1-M1-A2
gcgcattgacactgaaaaggattatccttaccttggcttcaataaccaatgtgatccaacaaaaaaaaacgctaaggttgttagcattgatgggtatgaggatgttccaaataacgagaatgctttaaaaaaggccgtcgcacatcagcctgtgagtatcgccattgaagctggtggtagagctttccaactctatgaatcaggagtttttaatggtgaatgcgggttagctttagaccacggtgtggttgcggtcggctatggcaccgatgataacggtcaagactactggattgtgaggaattcatggggcagcaattggggtgaaaatggatatataagaatggagcgtaacatcaatgctaataccggaaagtgtggtattgcaatggaggcttcctatcctggtaagaatggggcaaatatc

SEQ ID NO: 51752 - DNA, 394 bp, Gossypium hirsutum
  Clone ID: LIB3197-045-Q1-M1-A3
tttttattttcactcacttcacctgagattttgttttcttttgtttttcagtaatggggaagattaagatcggaattaacggatttggaaggatcgggcgtttggttgcgagagttgctctccaaagcgaagatgttgagcttgttgctgttaatgatcctttcatcaccactgattacatgacctatatgtttaagtacgacagtgttcacggtcaatggaagcaccatgagcttaaagtgaaggactcaaagactctcctctttggtgaaaagcctgtcactgtttttggcatcaaaaaccctgaggaaattccatggggtgaggctggtgctgaatatgttgttgagtctactggtgtcttcactgacaaggacaaagctgctgctcactt

SEQ ID NO: 51753 - DNA, 428 bp, Gossypium hirsutum
  Clone ID: LIB3197-045-Q1-M1-A4
cccacgcgtccgcacaaagattgagtttcggtgaattcccatttactgatcccatcttttacggaatcgatcccctacaagaatatgtggagctcggcatgtctggaagcacaggagaacgttcttttgctgatattattaccagtattcgatactgggtcattcatagtattactataccttccctattcatcgcgggttggttattcgtcagcacaggtttagcttatgatgtgtttggaagccctcgtccaaacgagtattttacagagagccgacaaggaattccattaataactggccgttttgattctttggaacaactcgatgaatttagtagatctttttaggaggacccaatgaccatagatcgaacctatccaattttacagtgcgatggttggctgttcacggactagctgtaccta

SEQ ID NO: 51754 - DNA, 396 bp, Gossypium hirsutum
  Clone ID: LIB3197-045-Q1-M1-A5
tgaagatgaaatttccttccatctgcaacaaatcgagaaccaaagggatgtcatggaaactgtcgcttttctatcacttgaaagccgttccattcataaacaagcctagaaggttgaagcattccacttctgctttatcagacagcactgccaagtttatttcagccttggattgctcttggtctcaatcaagacattgtttcacagtgcccaaagattctgaagaactgttggatatggctatcgaggcactgcggtccaacaggctgttcttcgaaccggatgacactggtttcattctagaaggcagcccaggttccaattcaaggattgtgtggcattggccatggaaaacaggtggatcccatacatgggattttcgagttttcaatggga

SEQ ID NO: 51755 - DNA, 336 bp, Gossypium hirsutum
  Clone ID: LIB3197-045-Q1-M1-A6
gtaggtgccgactgctccgttctttgtagcaaagcaaagtttgtgaagcatggccgtcgggaagaacaagaggatttccaagggaaagaagggaggaaagaagaaggcagcggatccttttgctaagaaggattggtacgatatcaaggctccttcagttttcactaccagaaatgtggggaaaactctcgtctcccgtactcagggtaccaagattgcttctgaaggactcaaacaccgtgtgtttgaggttttcccttgctgatcttcaaggtggtgatgaggatcatgcttacagaaagattcgtttgagagctgaagatgttcaaggaaaaa

SEQ ID NO: 51756 - DNA, 379 bp, Gossypium hirsutum
  unsure (1)..(379): unsure at all n locations; Clone ID: LIB3197-045-Q1-M1-A7
ggatatgctacgggtgaagattggcaacacctggttgttggcaggacattactgttcatccacaaaaggatcttagtcaacgaacctttgttgaccaaacagccaattctgcggaccacaatgcgcaactttaaccatgttccccccatagctaaggtgtagcctccgtcgtatgccgcctacaagaaattcctccgccatcctatttatcaaattccaaaacccgcgatattcggatttcaaaggctcgcgccaatgagctttcatggcgtccaaatcgtctaagaagaagcctaacagcaagcggtcaagctccaagcccgccttctccccgatggcatctncgaagcattntcatctcaaaagattcttcatttta

SEQ ID NO: 51757 - DNA, 432 bp, Gossypium hirsutum
  Clone ID: LIB3197-045-Q1-M1-A8
gaagccatagttatttacccagcatctatgcttactcacctggcacccatggtagagttcgccaagctcctcctcactcaacacccttccctttctatccacatcctcatcgccacccttccttcacaaccttcctccaccgttccctcccccgttcctccttccatcaccttccactacctccccacattcgacctccttccaacctcaaccgacttagatccgcttttcttcgacgtcatccgcctcagaaaccccgatgtccgtcgcacccttctcaccatctccaataactacacactcaacgccattatcgtcgacttcttctgcaccagcgcagcattcgaagtggcctccgatctcaaccttccagcttactctttcctccctaccgccctcggtgccgctgcttgcttactttatttgcccacc

SEQ ID NO: 51758 - DNA, 431 bp, Gossypium hirsutum
  Clone ID: LIB3197-045-Q1-M1-A9
gtcagccaattgtttgagctagctagctcttactcaaatggcaaccaaaacgatgatgttgcaaatattttcacttttcttctttttgttcagtatctgcaactccattttccttggtgctaatggagatgacaatggtggttggcaaactgcccatgccaccttctacggtggtgctgatgctaccggcacaatggggggagcttgtggttatggaaacctgtacagtcaagggtatggaacgagcacagcagctttgagcactgcacttttcaacaatggcttgagctgcggtgcctgctacgagctccggtgcaacaatgatcctcaatggtgcattagtcgaaccataaccgtgacagccaccaacttttgtccccctaactatgctttatctagtgacaatggcgggtggtgcaatcccccacgag

SEQ ID NO: 51759 - DNA, 328 bp, Gossypium hirsutum
  Clone ID: LIB3197-045-Q1-M1-B1
gctgtgtggatttttcttttccaagggaggactatgaactctcttggaagttgaaatatctgtcattcagtatacaccggcaattgatatttggagcattggctgcatctttgccgaggtattgatagggaagcctctatttcctggaaaaagtgtcgttcatcaattggatttgatcactgatcttttggggacgccttcacctgaaactatttctggagtccgaaatgataaagcacgaaaacacttgacagaaatgcggataaaacaacctgtgcctttctcacagaagttcccaaatgcagacccgttagcagtgcggctattg

SEQ ID NO: 51760 - DNA, 428 bp, Gossypium hirsutum
  Clone ID: LIB3197-045-Q1-M1-B10
cgaaagctaagcaaggaaatggcgatcccttccagttctgcttatctcttcttactctcctttttcaccctttctctattccttgctatttccactgctgaatctgaatctgaattagaactggtagccgatctccgcgcccttcagtccgaatccaaatcaggagtcatccacttagatgaccgaaccattgccaaattcctaacctcccccaaaatccctcgcccttactctatcctcatcttcttcgacgccacccaactccacgacaaaaccgaactccacctccgcgagctccgccaagaattcgccctcgtcgcctcttccttcatcaccaaccacaacaactccaacaccaagctcttcttcgccgacatcgagtttcgcgaatctcaatcttctttccacctcttcggcgtcaactccct

SEQ ID NO: 51761 - DNA, 371 bp, Gossypium hirsutum
  Clone ID: LIB3197-045-Q1-M1-B11
gttcttacagccgtccaaatgggtcgtgtcatccgagctcagcgtaagggtgcgggttccgtcttcaaggcccacacccaccaccgcaagggtcccgcccgttttcgcagcctcgacttcggtgaacgaaacggctacctcaaaggcgtcgtcaccgatgttatccacgacccaggccgcggtgcgcccttagctcgcgtcgtgttccgtcacccgttccgttacaagaagcagaaggaactgttcgtcgctgctgagggtatgtacaccggacagttcgtgtactgtggtaagaaggccacccttatggtcggaaacgtgttgcctcttagatctatccccgaaggagctgtcgtttgcaacgtggaaca

SEQ ID NO: 51762 - DNA, 431 bp, Gossypium hirsutum
  Clone ID: LIB3197-045-Q1-M1-B12
gagaccaccaaatactattgcactgtcattgatgctcccggacatcgtgactttatcaaaaacatgatcactggtacctctcaggctgactgtgctgtccttatcattgactccaccactggaggtttcgaggctggtatttcaaaggatgggcagacacgtgaacatgctttgcttgcctttactcttggtgtgaagcaaatgatttgttgttgcaacaagatggatgccacaactcccaaatactcaaaggcaaggtacgatgaaatcgtgaaggaggtttcttcatacttgaagaaggttggttacaaccctgagaagattccattcgtccctatctctggttttgagggtgacaacatgattgagagatcgaccaaccttgattggtacaagggtccaactctgctcgaggctcttgaccagatcaa

SEQ ID NO: 51763 - DNA, 406 bp, Gossypium hirsutum
  unsure (1)..(406): unsure at all n locations; Clone ID: LIB3197-045-Q1-M1-B2
ttcagatttcatcaaatcctatatgaaagaatactttctgcgaaaacaaactcaacaggtgttgagttaaagcggaaaaactcaaaagaatcgtgttcttcagatttttatgccagatttatgagtgcactgtacagtctacttgatggatcttctgacaatatgaagtttgaagatgaatgtcgggcaataataggaaaccagtcatacgtattattcacattggacaagttaatatataaattggttaagcagcttcaagcttgtgcaacagatgagatggataataagcttcttcaactgtttgagtatgaaaaatcccggaaacatgcaaggacaatggattcagtgtattatgaaaatgcgcgtgtcctncttcatgaggagaatatttatcgattgaaat

SEQ ID NO: 51764 - DNA, 326 bp, Gossypium hirsutum
  Clone ID: LIB3197-045-Q1-M1-B3
cgcatcttcgcccatcgccaagatgcagatcttcgtcaaaaccctaacggggaagactataaccctagaggtcgagtcttcggacaccattgacaatgtcaaagctaagatccaagacaaggaaggcattccacctgaccaacaacgtcttatcttcgccggcaagcaactcgaagatggccgcaccttagccgactacaacatccagaaggaatccactctacaccttgtcctccgtctcaggggaggtgcgaagaagagaaagaagaagacctacaccaagcccaagaagatcaagcacatgaagaagaatgtcaagctcgctg

SEQ ID NO: 51765 - DNA, 372 bp, Gossypium hirsutum
  Clone ID: LIB3197-045-Q1-M1-B5
cggacgcgtgggcggacgcgtgggataggagtagccgatggtgtaggtggctgggctgaagtcggtattgatgctggtgaatttgctcgtgaacttatgtctaattcggtgaaagcaattcgagatgaacccaaaggttcagtcgacccggccagagtattagagaaggcccattcaagcacaaaatcacaaggatcctcaactgcgtgcgtcattgcccttcacaaggagggactacatgcaataaatttgggggacagcggtttcatagttgttagagatggttcaactgttttccattccccagtgcagcaacacgggttcaattttacttatcagttggagagcggtaataatggtgatctaccgagc

SEQ ID NO: 51766 - DNA, 412 bp, Gossypium hirsutum
  Clone ID: LIB3197-045-Q1-M1-B6
gagctctgtcaagttctctctcaaattcttcaacatttattttttctttctatacttgttttgtattttgttttgagttgatatggctggcaaaggcgaaggtccggcgattggtattgatctcggcaccacgtactcgtgcgttggtgtttggcaacatgatcgtgtggagatcatagctaacgatcagggaaacagaaccacgccgtcttacgtgggttttacagacactgagcgtttgatcggtgacgctgctaagaatcaggttgctatgaaccctaccaatactgttttcgatgctaagcgtttgatcggtagaagattcagcgactcttctgtccaaagcgacatgaaattgtggccatttaaggtcattcctgggcctggagacaagccaatgatcgtcgtcaca

SEQ ID NO: 51767 - DNA, 352 bp, Gossypium hirsutum
  Clone ID: LIB3197-045-Q1-M1-B7
gatggcggagaagtgagagattaaaagagtttatagaagcatctcctccgagtggaagtgatttataagttggcaactcccgaggtgtctctttcacaaaacaggtgaaaaaaaagcaaagaaacagaatactactgttactgttagtattaaagaaagaaagaagcttttaaagtccagagatagaaatcaagtccaaggagaacaacgcactacagacaaattccaattatattattaataatcaaatacctataatatttatatataggaaaaccccacccttactcaataaagcttcagactgggttttctatgtgaagtttaagatttttttttctttgtgatggat

SEQ ID NO: 51768 - DNA, 305 bp, Gossypium hirsutum
  Clone ID: LIB3197-045-Q1-M1-B8
gagcaacgagcttggagttatcgagggaaagaggctaaccgtcgaggataccgaaccggagaagacagaggcggaagcactgaggaaagctttattcatcactcgacaaatgtagtgcgctgagcagagtactaccgggagtgtctagcatgactacaccggttgataatagagtgtctttcacgagatcaccgtcagtcacatcttttactttcgacaatacctcatatatatcggttgaaccacctggtgattctagccatactacagggaatttagcttcatcaatgttgattaaatgctat

SEQ ID NO: 51769 - DNA, 388 bp, Gossypium hirsutum
  Clone ID: LIB3197-045-Q1-M1-B9
aaatggtgcagctgctgtgcttgactctgcaatcaaatggtggaaaactgctatgaccgaggacgaccagcttagtgttattatgcgagaggctgcatccttcaaactcaggcatggcaaggaggaggaagctgcccacctatacgaggagcttgtaaaaggtaacggaaatatagaagcattggttgggctgataactacagttgctcatgcaaatgttgagaaggctgaagcctatgagaagcaattgaagccattaccaggtttgaagggggctgatgtggatgctttggagaaaacttcaggagcaaaacctgttgatggtgcttctcgtgccgggcttgctgaagctcaagaggatggtaagaccaaagagaaaccgaagaaa

SEQ ID NO: 51770 - DNA, 321 bp, Gossypium hirsutum
  Clone ID: LIB3197-045-Q1-M1-C1
cctgtcgtcccacgcctcctcataaaggttagcagctgagttgggagatgatgtccctcctgtggcagtggataaaaatccttccctattgatacctccaacccctgttatgtgtggtggtgattggccccttctgagagtcatgaaaggcatatttgatggtggatttgatggtggcaggggtgctgtggatgaagaggaggagggtgcataaggtgactggggtgaagatcttgatgtggttgatggcttgcggattgtggacgttagtgccattttggaggatggggaagtggccgcaaaaaatgaagaggggtggat

SEQ ID NO: 51771 - DNA, 426 bp, Gossypium hirsutum
  Clone ID: LIB3197-045-Q1-M1-C10
gaatgtataaaaccctattttgggggccacgggtattctcctcagataagtaatcccccagagtctcttccctcatctacccccaaatctcctcacattatgtctttggtggccaacgaagattttcagcacattttacgtgtgctgaacaccaacgttgatgggaagcagaagattatgtttgcattgacctccatcaagggtatcggaaggcgattcgctaacatcgtttgcaagaaggctgatgtcgacatgaacaagagggctggtgaattgactgcacaggagttggacaatctcatgaccattgttgcaaaccccaggcagtttaaaatccctgactggtttttaaataggcagaaggattacatggacgggaagtattcccaagtcgtgtctaatgctcttgacatgaaattgagggat

SEQ ID NO: 51772 - DNA, 424 bp, Gossypium hirsutum
  Clone ID: LIB3197-045-Q1-M1-C11
ctcttgtcaaacaaaacacgcttcagccagcggccctcctcttccctccttcactcgtttctcgattttgtttccctcagcttcacttcctcttaagaaattcctctctttttgtcgcctctaatattgttaatttctagggttacgttgagtaatggattggggaaacgttaccgccgaggatctgatcgacgctcttcgtgaagttgactggtcatcaccgccgcgacctctctccgaattcttctcccgcttcaccatccctcggtcatacgtcaaatggaacagccgcattaaatgcaatctctactactatcgcactaattatttcattctgattgttctcattctcggtttgggattcttgaggagaccgcttgctattttagctgctattttgacagcacttagcattgcttttctg

SEQ ID NO: 51773 - DNA, 434 bp, Gossypium hirsutum
  Clone ID: LIB3197-045-Q1-M1-C12
cacgcgtccgaattgtttgagctagctagctggtgactaaagggcaaccaaaacgatgatgttgcaaatatttccacttttcttatttttgttcagtgtctgcaactccattttccttggtgctaatggagatgacaatggtggttggcaaactgcccatgccaccttctacggtggtgctgatgctaccggcacaatggggggagcttgtggttatggaaacctgtacagtcaagggtatggaacgagcacagcagctttgagcactgcacttttcaacaatggcttgagctgcggtgcctgctacgagctccggtgcaacaatgatcctcaatggtgcattagtcgaaccataaccgtgacagccaccaacttttgtccacctaactatgctttatctagtgacaatggcgggtggtgcaatcccccacgag

SEQ ID NO: 51774 - DNA, 183 bp, Gossypium hirsutum
  Clone ID: LIB3197-045-Q1-M1-C2
aaagtgcggagcatcctggaagggttatgtgagagtgcaaagagtacatactggaagactgaagatgaatgtggagcaatggctggtttaggaggtgacactgacgcccatccctatgtctccttcacgatcaatattgcttgaaactgttgttgatttcttcaagcatatccatcaagacat

SEQ ID NO: 51775 - DNA, 360 bp, Gossypium hirsutum
  unsure (1)..(360): unsure at all n locations; Clone ID: LIB3197-045-Q1-M1-C3
ctgaatttctcagttgttggttggttgattgattgttgttgtggttgaagaggatgtgggctgcttcatgtcttgcatcttgttgtgcggcatgtgcctgcgatgcatgccgcacggtggtttcggggattagtcggagatctgcaaggatcgcttattgtggactttttgctctttctcttgttgtttcgtggatccttcgtgaggttgctgccccgctgatggagaagctcccttggatcaaccatttccataaaacacccgacagggaatggtttgaaacggatgcagtgctgcgggttagcttgggaaactnntctgtctttactatcctagctttctcaatggtgggtgtgaaaa

SEQ ID NO: 51776 - DNA, 419 bp, Gossypium hirsutum
  Clone ID: LIB3197-045-Q1-M1-C4
tcatgcttaaaaccctatatgaaatttaaaatgttatagcaatttctctcattttcattgtcacaggaactatcaaatcgcaaaaattcctttttaacttggactctgtgtatttttgtcttgaggaggtcctcattgagttccattgtcatcgcctaaattttctgtattttattttaatacctaaatttttccgtcgtttaattcaccgtctccactctccaacgccaaaccctagttttaattgacttgtatatacatctctgaatgcatttctttgtctatcggtagtttttggtatcaaaagaatatttcttcaatcattttgtttaaatcttctctttccctttccccccctcctggtgtggtcctcgaggggtcaagttttgaaaatggatatcgagcaaaatcaagctgag

SEQ ID NO: 51777 - DNA, 428 bp, Gossypium hirsutum
  unsure (1)..(428): unsure at all n locations; Clone ID: LIB3197-045-Q1-M1-C5
cgaaacttctctgaagaggttgctgttcttgataactatttcgggaagcttggcgctggtagcaaggcttgtgtaatgggtgggctggataaacagaaatggcatgtgtactctgcatctgcagaacctgtgaccgccactggcccggtttacactctagaaatgtgcttgactggtttggacagggataaggcgtcggttttctacaaagaccaattcaggctccgcagctgtgatgaccattaattctggcataaggaagatccttccagagtctgagatatgtgattntgagtttggaccctgtggttactcgatgaatgcgattgaaggtgctgcaatttctactattcatgttaccccagaagatggatttagctatgcaagctttgaagctgtgggatataatctgaaagataagaatctga

SEQ ID NO: 51778 - DNA, 293 bp, Gossypium hirsutum
  unsure (1)..(293): unsure at all n locations; Clone ID: LIB3197-045-Q1-M1-C6
gtttctgcccgcctctcattgcaaaatactatattttgcagcggcagaaggagctctctctcattctctctgagacatccttttagcttttgattttagtttataacaatcttaatccaaatgccttctttggctttatctgacctcaaagagaagaaagaagagaaaatgatgaagaagaagatcgctctcgaaacacctgaatccgagaggaaaacgaagaagatcaaggaacctaaggttagagaagaggaagatgaatcggctgtgaagaagagntaaaaagaagcgta

SEQ ID NO: 51779 - DNA, 262 bp, Gossypium hirsutum
  unsure (1)..(262): unsure at all n locations; Clone ID: LIB3197-045-Q1-M1-C7
gcacaattacagatgaagacattgatagaatcattgccaaaggagaagcagcaacagctgaacttgatgccaagatgaagaaatttacagaggatgctattaaatttaagatggatgatactgctgaattgtatgattttgatgatgaaaaggatgaaaacaagtttgacttcaagaaaattgcaactgaaaattggattgagcctccaaaaagagagcgaaagcggaattactcanaatctgagtactttaaacaaaccct

SEQ ID NO: 51780 - DNA, 407 bp, Gossypium hirsutum
  unsure (1)..(407): unsure at all n locations; Clone ID: LIB3197-045-Q1-M1-C8
aatgatgtctacaacacacttgctagtattcctacttggagtggtgactctcaccactcccacatttggtacctatgagtcaccaaattatgggaaaccccctactcctgtattcaagcctcccaaggtgaaaccaccaccatatgaacctaagccaccagtgtatgaaccaccaaaaaaggagaagcctgaacctaagccaccggtttatgcacctccaaagaaagagaagcatggacccaaaccaccaatgtatgaacctccaaagaaggagaagcctgagccaaagccaccagtttatacacctccaaagaaagaggagcctaaacctaaaccaccagtatatgaacctccaaagaaggagaaacctgagccaaaaccaccgatttatacacctncaaagaaag

SEQ ID NO: 51781 - DNA, 343 bp, Gossypium hirsutum
  Clone ID: LIB3197-045-Q1-M1-C9
gaatgtataaaaccctagtttggctcccacgggtattctcctcagataagtagtcccccagagtctcttccctcatctacccccaaatctcctcacattatgtctttggtggccaacgaagattttcagcacattttacgtgtgctgaacaccaacgttgatgggaagcagaagattatgtttgcattgacctccatcaagggtatcggaaggcgattcgctaacatcgtttgcaagaaggctgatgtcgacatgaacaagagggctggtgaattgactgcacaggagttggacaatctcatgaccattgttgcaaaccccatgcaggttaaaatccctgact

SEQ ID NO: 51782 - DNA, 312 bp, Gossypium hirsutum
  Clone ID: LIB3197-045-Q1-M1-D1
gaaggacatgaggtgatagaaattcataaggagaatggatgacaaacgccacacggttttgccttcatttgtagaacatgaagttattcgaatattatcacaataacacaacaatcaaacaccataatcattggggaagcgtcagagcgcttcacttgagcagccccttagacttcaaatattccacggtttggtcgtagatttcctcgatcccatacttaaagctgaacctttcgctaataagcttctctgaggaaatgatcaacttgggtttggaggggaaatctccaaaatcggtagggactttgaagt

SEQ ID NO: 51783 - DNA, 430 bp, Gossypium hirsutum
  Clone ID: LIB3197-045-Q1-M1-D10
atggggagcactgcacttgaggagtcctccgtcctttgctacagtactaaaacatctacagattatcgggaaaaatggtggtgaagacactcttgctcactggcctactgcatcaggcatgatgaccatagatgatgctacttatgaagttttgaaatatttggataaaatatggggctccctctcttcttcagatatagcaaagctgcaaggagtggcatttctgcctgctgcaaatggaacacgcctggtgccagctaactctctttttgcacgtttgaccattaatttggctccattttcttttgagcttccttctctctatcttcctttcatgaagattcttaaggatttgggacttcaggacatgctatcagttgcttctgcaaaagagcttctgttaaatctacagaaagcatgtggatatcag

SEQ ID NO: 51784 - DNA, 327 bp, Gossypium hirsutum
  Clone ID: LIB3197-045-Q1-M1-D12
gtaaaaagccacccctagccgggtcagttgatgggaagaaaagagtgtccgccggtcacatttgatctcccctacctggctttctattataaccagaagctgctgttttacaagaacgaccgtggtggggagttcccggacacggttgaagcgctcaaagatgggctgagggtgatgttacatgagctttatcagctaggaggttagctcgagcaagatgacgattgcgcttttagagtgagattatgacgacgatatggctggtgttgcagtggtcgaagccctcgcagatgatattaccgttatcttaattgatctgtgaagata

SEQ ID NO: 51785 - DNA, 350 bp, Gossypium hirsutum
  Clone ID: LIB3197-045-Q1-M1-D2
gctataagtagggcggcattccaagcacctcatttgcaagaggtctttactcttcagctgtttttcagtccccaatagaaaagcttaaaacagaactcagcatttgtttgtctgctatttctctccatattgctagcatttgttttagctgagaggcaaaacttcggaacagcaaaagaatacagtttgtttctaaaaaattcccaaggacagagaaagcagagtagctgtgttagggaaagaaaagatggttgcacctctgtcagcttggtcctgggagaacttcggagttttcaagtatctgctatacggtcctttagctgcaaaagtattgtattcatggatctatg

SEQ ID NO: 51786 - DNA, 398 bp, Gossypium hirsutum
  Clone ID: LIB3197-045-Q1-M1-D3
atcagtctcttaaaagagcaatacgaaaccaaaagcaaagaagcaaagtctcacacttaggcagagaaaaaacaaaaccaaaaacctaaaaacccaaaattcaaaatggatgtaattaaaacccagcaaatttcatctcgacccatagagaaggtaatagttcatcctttggttcttttaagtatcgtcgataactacaatcgcgtcgcgaaagacacgcgcaagcgcgtcgtcggagtcctccttggttcttccttcaaaggcaccgtcgatgtctccaacagctacgcagtgcctttcgaggaagatgagaaggacccgagcatatggtttctcgaccacaactaccatgaatcaatgttttcgatgttcaagaagataaatgcccaagaacatgt

SEQ ID NO: 51787 - DNA, 370 bp, Gossypium hirsutum
  Clone ID: LIB3197-045-Q1-M1-D4
ggaaatggcaggcgtcgaagcagggaaggaggaggaggcgaccgctgtgagaatcaccggaaaaagccacgtcaagccgggtaagttgataggaagaaaagagtgtccgttggtcacatttgatctcccctacctggctttctattatcaccagaagctgctgttttacaagaacgacggtggtggtgagttcgaggacaaggttgaaaagctcaaggaagggctgagggtggtgttagaggagttttatcagctaggaggtaagctcgggaaagatgacgatggggttcttagagttgattatgacgatgatatggatggtgttgaagtggtggaagccgtggcagaagggattaccgtcgatgaattg

SEQ ID NO: 51788 - DNA, 437 bp, Gossypium hirsutum
  Clone ID: LIB3197-045-Q1-M1-D5
ctttctttgaggttgttttcaccggaggccgcacacaaccaggcacaatcaaacctgatgagggggagcgtcacccttactctgtaatagagtgtgaggctaaacgtgaaaccattttgccatctgtgatctacatacagaaaatcttgcgtcgaaggccttttctgataaagaatcttgaaaatgttatgcgaagattcttgcagtccttggagctgtttgaggacaatgaaaggaagaagcttgcaattttcacagcacttgctttttcccagaagctatcagggctgccacctgagactgtgttccagccactgctcaaggacaatcttgtggtcaaagggctagttctttcattcataacagacttcttcaaggagtatctggtggataatagccttgacgaattattttcaattctgaagcgagggaaaatg

SEQ ID NO: 51789 - DNA, 426 bp, Gossypium hirsutum
  unsure (1)..(426): unsure at all n locations; Clone ID: LIB3197-045-Q1-M1-D6
ataaggtcccgttcatattgggtgtcgaggtggaccctaacggtgggccaaggattcaagaagcagctatgaggttgtactcggagcaaaaggagggcaataaggtctctctagtacaagcattgcaagccatcgaagcggccttgaaacggttcttttttgggtacaagcaagtgttgatgatcgttatggggagtttggaagcgaaagggaacagagtcgtggcgtgttccgactcgggtgactcgttgagtcagatattcttggagcctacttatttccccagtttggatgctgctaagacgtttttgggcgagttntggagtcgtgaacagggtgagtctcggtccaagaagtgatgatgactcggacccgtcggttggttaatcataaaaagaaaaaaaaaggggttaattattcttttta

SEQ ID NO: 51790 - DNA, 309 bp, Gossypium hirsutum
  Clone ID: LIB3197-045-Q1-M1-D8
cggacgcgtgggttgcaagcttttatcgctgcttatgctgaattggaaaccactctctctggcttgaatgttttgattgagacctactttgctgatctcactgctgaggcgtacaagaccctcactgaattgaagggtgtcactgcttatggtttggatttggctcgtggaacccataccattgacttgatcaagagtaacttccctaatggcaagtacctctttgctggagttgttgatggaaggaacatttgggccaatgatcttgcttcttcacttacgaccttgcaggctcttgaagctgttgtg

SEQ ID NO: 51791 - DNA, 428 bp, Gossypium hirsutum
  Clone ID: LIB3197-045-Q1-M1-D9
gctgctacatttttctacagggcacctgagtgccgggacatccggaaatcatcgactcaaccggctgatgtttacagcctcggtgttcttctcttggagctcttaacaggcaaaactccattccaagaccttgttcaggagcacggttcggacatccctagatgggtaaaatcagtccgggaagaagaaaccgagtctggcgatgatcctaattcgggtaatgaagcatccgaagggaagcttcaagctcttttgaacattgcaatggcttgtgttgcaatcgcaccggataaccggcctgcaatgagagaagttttgaagatgattagagatgtgagggccgaggctcaagtatcgtcaaacagtagcgatcattcgccagggcgatggtctgacacggttcagagtttgcctagagaagaacatct

SEQ ID NO: 51792 - DNA, 378 bp, Gossypium hirsutum
  Clone ID: LIB3197-045-Q1-M1-E1
ccggatatccgcagccaatccggaagggactcgttggaccggcaagtgttggtacgtccataaccttctcaaatacgaattcgatctccagtttgatatccccgttacttatccggccactgctcccgagctcgagttgcccgaactcgatggcaagactcagaagatgtacagaggaaggaagatttgtctgaccgtgcatttcaagccactttgggcaaaaaattgtcctaggtttggaatagcacatgcactgtgtttgggacttgccccatggcttgctgcagagattccgattctcgtcgattccgggatgatcaagcataaagatgatgcagccacatcaaatgagtcttagcatgccgatgctgggatgat

SEQ ID NO: 51793 - DNA, 357 bp, Gossypium hirsutum
  unsure (1)..(357): unsure at all n locations; Clone ID: LIB3197-045-Q1-M1-E10
gttgcttgcaatgcagatccgctttgtcgggtgttaacatgtgcaatccggtgaacatatggccgccatgggcgtcttcttcttgatgcaagttttctactttttagattgggtgaagcacatgcttagtgacacaaaattgtttcaagctttcttgaggatcaccgtgacttctgcagtcgctgtggggtggtattgcttttgggattaggcatggtatccggttatatttcaccttggacaggaaggtttactctttgctggatccaacatatgccaaggatcacatccncatcattgcttctgtatctgagcatcagccaacagcgtggtcatctttcatgtttgatttccata

SEQ ID NO: 51794 - DNA, 426 bp, Gossypium hirsutum
  Clone ID: LIB3197-045-Q1-M1-E11
attgatccttaccatggtgatcaagctgctgacatactggtcgatttctttgaaaagtgtaagaaagatccatctcactgggataagatctcccaaggaggcttgaaacgtatcgaggagaagtatacatggaagatttactcggagagactattgaccctgaccggagtgtatggattctggaagcatgtttccaaccttgaacgccgtgaggtcgtcgttaccttgagatgttttatgctcttaagtaccgcaagctggctgaatcagttccattggcagaggagtaaatttaagctgttaaataacattgggccggtttttcttggagaataatattctgttttgtaatttcaattggagaagctcttttgtatttcatcttgtcttttccttttccttttttcgccggcattgtttgaacat

SEQ ID NO: 51795 - DNA, 347 bp, Gossypium hirsutum
  Clone ID: LIB3197-045-Q1-M1-E12
cgtcttcaaacacttcgaatcgttttccaattactctgacaagatgcaaatctttgttaaaaccctcactggcaagaccatcaccctcgaggtggagagttcagacaccattgataatgtgaaggctaagatccaagataaggaagggatcccaccggatcagcagaggcttatatttgctggcaaacaacttgaggatggccgcacgctagccgactacaacattcagaaagaatccacccttcacttggttcttcgacttcgtggcggcatgcaaatctttgtcaagactctcactggaaagacaattaccttggaggttgaaagctctgacacaattgataatg

SEQ ID NO: 51796 - DNA, 402 bp, Gossypium hirsutum
  Clone ID: LIB3197-045-Q1-M1-E2
aaaaaaagcatttattttgttctcgcaagatcgaaaaagtgaagaaaataaaatttattattttattaaagttttgtttgggggaaattgagagaaaaatttgaaaaaaaaaaaaatccaagatgaagatcacatcgttagtagtactgaagtgcaacccggaaggatccgatccgataatactagcgaacactaccgatgtgagccattttggttactttcaaaggtcaagcgtcaaggagttcatcgtcttcgtttctcgaactgttgctaaacgtactccttctggtcagcgccagtccgttcagcacgaagagtacaaggtacatgcttacaacagaaatggactttgtgccttgggatttatggatgatcattatccaattcgaagtgctttttcgc

SEQ ID NO: 51797 - DNA, 411 bp, Gossypium hirsutum
  unsure (1)..(411): unsure at all n locations; Clone ID: LIB3197-045-Q1-M1-E4
gttttagttccttcattttcattatcattatcatcccgatattcattcatatctctatttttctttttctccctttctatcttcttcatctctaagaagggggaaaaaccgtagaaagaaaaaaaaaaagaaaagaaacctaaaagcccatgattgttgatttgatggatctgtagatctaacgctttgagggaaaaaaaaaaaaccaacacgtatccgctccgtttcttttgatctccgttgttttcacctgctatgattcagtagctgaaaaccaaacagcttaatttctactgagaccgctctgattatttattggtttaagtatcttttggtcggtattttgcatccaatttggatgtttatggggaattggaggctggctcangtgagatgagggatgttatcaag

SEQ ID NO: 51798 - DNA, 372 bp, Gossypium hirsutum
  Clone ID: LIB3197-045-Q1-M1-E5
atttttcagagtagaagcttcactaagcttactccctccctgcttcccgctctctgtttctgtcgcttccatggctgtctcgtttaaaatgcctgtcgttttgggtttctttgtggggcttatgatgctgggtttggctagctcagctgagtttgatgagctgttgcaacctgggtgggcaaacgatcatttcatctatgaaggagagcttcttaagctcaaacttgataacttttctggtgctgggtttgcatcaaaaagcaggtatttgcttggaaaagtatccatgcagatcacacttgtggagggtgactctgctgggactgtcactgctgactatatgtcatcgggagggtccataccacagtgagt

SEQ ID NO: 51799 - DNA, 386 bp, Gossypium hirsutum
  Clone ID: LIB3197-045-Q1-M1-E6
cggacgcgtgggcttccttccttttctttctttttgctatggcaggaactggggtggtcgctgtttatgggaacggcgcaatagctgaaacccacaaatcccctttctccgtcaaggttggcctagcccaaatgctccgtggtggggtgattatggatgtcgtcacccctgaacaagctcgcatcgctgaagaagctggagccctgcgccgtcatggctcttgaacgagtccccgccgacatacgagcccaatgtggcgtggcgcggatgagtgacccacaactcatcaaagaaattaagcaagctgtcaccattcccgtcatggccaaggctcgtattggccatttcgttgaggcccagatccttgaagccattggcatcgacta

SEQ ID NO: 51800 - DNA, 316 bp, Gossypium hirsutum
  unsure (1)..(316): unsure at all n locations; Clone ID: LIB3197-045-Q1-M1-E7
agaaaagaatgccatatgcctgacctatggtgaagggtatagatttcggtttctgctcggtctcgaagttcactattgaaaaggacattcatgaagggttgaggagaacatttttttacatgaactttgaaaaggggagggattcatggggacaaacatgggatcgaatgctatatgttactaaggttcgtgcagtcattgacaagggtttaacatagattgtgtgtattgaaatgcagtacagtcagagaagtatatcaattaatatcacanaatgatgacagtttcacttctgcttgtggtggtaacatgaaaa

SEQ ID NO: 51801 - DNA, 432 bp, Gossypium hirsutum
  Clone ID: LIB3197-045-Q1-M1-E8
aaaccaccttgttctccccccttctacgtctttctggcaacatgggttcaccaccactttgggttctgcttctgggtgtgttgtttatggcttccggaacaatcgcagctccccctaagaagcctgtagatgtaccattctccagaaactatatgcctacttgggcttttgatcacattaagtatttcaatggtggctctgagattcagctccaccttgacaaatacactggtactggtttccagtccaaaggatcatacttgttctgacacttcaatatgcaaataaagctagtccctggagattctgctgggactgtcactgccttttatttgtcttctcaaaactcagagcatgatgagatagattgtgagttcttgggcaacagaacagggcaaccatacattcttcagaccaatgtgttcactggtg

SEQ ID NO: 51802 - DNA, 420 bp, Gossypium hirsutum
  Clone ID: LIB3197-045-Q1-M1-E9
gcttcttggccgaaaacccatcttccctggtacagagtgtctcaaccaacttaagctgatcatcaacataccttggcagccagaaggatcttgaatttatagataaccccaaggcaaggaactacattaaatcactcccatattcccatggaatccccttttcttgtctttatccaaatgcccatcctttggcaattgatttactgcaaaaaatgctagtttttgacccttcaaaaaggattggtgtaactgaagcactccaacacccttacgtggcacccttgtacgatcccaactgcaatcctccagcccaagtgccaattgatcttgacatagatgaggatttgggggaagaaatgatcagggagataatgtggaaggaaatgctttattaccatcctgaagctgctaatgctaatg

SEQ ID NO: 51803 - DNA, 324 bp, Gossypium hirsutum
  Clone ID: LIB3197-045-Q1-M1-F1
atttctacttcactctctccacttaactcttccatctgtacgggatcgttttgttgttcttcgatctccatcaatggcgaaagaaccagttcgcgtcctcgttactggagctgcaggacaaattgggtatgcccttgtacccatgattgctaggggagtcatgttgggtgctgatcagcctgtaatccttcacatgcttgatatcccacctgctgcagaggctttgaatggagtcaaaatggagttggtggatgctgcttttccccttctaaaaagtgttgttgctactactgatgttgttgaagcgtgcactggaatcaacat

SEQ ID NO: 51804 - DNA, 410 bp, Gossypium hirsutum
  Clone ID: LIB3197-045-Q1-M1-F10
cccacgcgtccggggagaagccttgaatcttgtttcgctaagtggtagttcatccgtggagtgggcacagaggtcttttgtctcacaaagacaaccactgacatggtacaaaacaactttcaatgctccagctggaaattctccattggctttagatatgggtagtatgggcaaaggccagatttggataaatggaaagagcattggacgccactggcctgcatataaagcatctggaaattgtggtatctgtagttatgccggaacatttaacgagaagaaatgtggaactaattgtggaggggcctctcaaagatggtaccacgttcctcgttcatggctcaacccaacagggaatttgttggttgtgtttgaggaatggggtggagatccgaatggaattactttgg

SEQ ID NO: 51805 - DNA, 408 bp, Gossypium hirsutum
  Clone ID: LIB3197-045-Q1-M1-F11
ccacgcgtccgactgaatctgttcccgaccggaaggtcgcggttttgggcgctgccggaggtattggccagcccttggctctcctcatgaagcttaaccctcttgtttctcggctggctctctatgatatcgctaacactcccggcgttgcagctgatgtcagccatgtcaacaccagatctgaggttgctggatatgttggtgaagatcaattgaagcaagctttggagggatgtgatgttgtcatcattcctgctggggtgccaagaaagcctggtatgactcgcgacgatcttttcaacatcaatgctggaatcgtcaagggtctatgtgctgctattgccaagtattgccctaatgcacttgttaatatgatcagcaaccctgtcaattcaactgtcccattgc

SEQ ID NO: 51806 - DNA, 418 bp, Gossypium hirsutum
  Clone ID: LIB3197-045-Q1-M1-F12
atttactgatgtttacattgcgactgagctcatggataccgatcttcaccaaatcattcgctctaatcagagtttatcggaggagcattgccagtatttcttgtatcaaattcttcgaggactgaagtacatacattctgccaatgtcattcatagagatttgaaacccagcaacctcttgctgaatgctaattgtgatcttaagatttgcgactttggtctcgctcggcctactgctgagaatgagtttatgactgaatatgttgtcacgaggtggtatcgggcaccggagatattgctaaactcttcagactacaccgctgccatagatgtctggtctgttggttgcatcttcatggagctcatgaataggaagcctctgtttccaggcaaaaatcatgtacatcaaatgcgttta

SEQ ID NO: 51807 - DNA, 401 bp, Gossypium hirsutum
  unsure (1)..(401): unsure at all n locations; Clone ID: LIB3197-045-Q1-M1-F2
cccacgcgtccgcatggttggactttgccatttctccgagcttgcagatgatcacattgagaacatccaaactaactatgctgcaggggagaaggttaaagcaaagatattaaagttggacgaggaaagacaccggatttcccttggcatgaaaaattcatattttaccgatgatattgacttccaaataactgaacaagaagagtctgatgaagacattgaagagactggtgtagcagatgatgaggcacgatcaatactgttgacagacagaactgggatggatatcgagtacagaagtggagtgagcgatgttcttgctcaagcagaatctagagcttcaattcctncacttgatgtcactcttgatgacatttgacactctgacatggaaaatttta

SEQ ID NO: 51808 - DNA, 372 bp, Gossypium hirsutum
  Clone ID: LIB3197-045-Q1-M1-F3
attttctttttctttttgtttgagaaaaatcttggaagagaaacgaacaatcatggaggaggctgtcaaagaacaacaatctgctgctcaaatttctgggagtgcagggaagtcgaagctacgttatccacttcgatcctcaatgaaaccaaaggagcagaagcctcccgcgcctgatttatccaattcttcttcatccagaagggggagggcaacacccagtgtaagcaagagtgtgggtgttctagatctttcaaaggagaaatctgggtcaggaaagccgcccaggaggctttccatcccaaccaaatcaacagtgactgcatccccaaaatttgttgtgacaaccactcctatattcgagggtagagc

SEQ ID NO: 51809 - DNA, 433 bp, Gossypium hirsutum
  Clone ID: LIB3197-045-Q1-M1-F4
cagattcagaaagaaataaaggaagaagaagcaatggccactcttacagtgcccacgacagttccttcggtgtctgaagattgtgaacagctaagaaaagccttttcaggatggggaactaatgagggcttaatcatagatatattgggtcacagaaatgccgagcaacgaaacttgattcgaaaaacctacgctgaaacctatggagaggatctcctcaaggcactagacaaggagctctcgaatgactttgagaggctggttttgctttgggctcttgatcctgctgaacgtgatgcccttttggctaatgaaaccaccaaaaggtggacttcaagcaatcaggtccttatggaaatagcttgcacaaggtctgccaaccaactgcttcacgcaaggcaggcttatcatgctcgttataagaagtcgcttg

SEQ ID NO: 51810 - DNA, 421 bp, Gossypium hirsutum
  Clone ID: LIB3197-045-Q1-M1-F5
ctgaacctgatacagatgaagtttatgcccaaataactctggtacctgaagtagatcaaagtgaggttatgagcccagatgatccacttcaagaacctgaaaggtgcatagtccattcattttgcaagactcttactgcttctgacactagcacccatggtggattctcagttttgcgccggcatgcagatgattgtctgcccccgctggacatgacacagcagccaccatggcaggaactgattgcaactgatctgcatggaaatgagtggcattttcggcatatttttcgaggacaacctaggcgccacttgctcactactgggtggagtgtctttgttagttccaaaaagctagtagctggagatgctttcatattcctgaggggtgctaatggggatctgcgtgttggagtgaggag

SEQ ID NO: 51811 - DNA, 429 bp, Gossypium hirsutum
  Clone ID: LIB3197-045-Q1-M1-F6
cggacgcgtgggtctaaaccttcttcccatttcttcattacattgttcaagaacaaacaaaaaaaaaaaagaagcaaaaaaacatggccaaagttctgttgttcattgctctatgtgtgcttccagctttggttagtgctacacgcattctgaataaccaattggtggttgaaggctatgtgtactgtgatacttgccgtgctggttttgaaacccctaagactagaaggctagctgatgccatggttaagctggtatgctccgacaggaagaccggcggagttgttttcgagaaggagggatataccgacaaaaccggaaaataccagattcgtgtatccgaggatcacttggatcagatctgtgatgcagttcttgtgaagagcccccagcttggatgtgccacaatggcccccggtcgtgaacgtg

SEQ ID NO: 51812 - DNA, 376 bp, Gossypium hirsutum
  unsure (1)..(376): unsure at all n locations; Clone ID: LIB3197-045-Q1-M1-F7
cggacgcgtgggctctctctcaacgcagagcgaataggcggagacttccaagaatctatcgcatcagctaatcacgctccaaagaatggatcaggttcaacacccatctgtcatgcagaaggtagcaggccagctccttcgttctagccattctcaagattttcaaggttataatgggtctttcaggagtcctgctctataccaaaggcgtgctgcatatggcaattactccaatgctgcactgcagtatcctgtccgggcttgtggagacctgtctatggttccatcaacagcttcagctatttgcgttcaagcccctgctgagaaaggatttgccagcttntgccatgatttcctcatgggtggagtttctgct

SEQ ID NO: 51813 - DNA, 420 bp, Gossypium hirsutum
  Clone ID: LIB3197-045-Q1-M1-F8
gccttcgcttccatagggtacttaatttagtgctcattgttgtggggatctgtgaaaatgaatggagctgtgcttgtagctcttgcagcagccattggtaatatgttgcaaggatgggataatgccaccattgcaggtgctgttttgtacataaagaaagagtttaaattggaaagtgcaccaactatagaaggcctgattgtagccatgtctcttatcggagccacctgcattactacatgctcaggaggcatatcggattggctaggtcgtcgccccatgctaataatctcgtccgtcctttattttcttagtggtcttgtgatggtatggtctcctaatgtttatatcttacttttggcaagacttttggatggatttgggatcggtttggccgtaactttggtcccggtttacata

SEQ ID NO: 51814 - DNA, 421 bp, Gossypium hirsutum
  Clone ID: LIB3197-045-Q1-M1-F9
ggcattttctgtttttctcaatgggaatggatgcttcactgactatgtgcaaatcggtcacatcacctcctggcttattcttggggagaagtagagttattaggagttcccagtgtacctttatggtgggaagcaggatcaactttgctaggcagaaagctcattcaacccaagttaaatgtaaatctagcaggtgtggagtagctcttggtgctaaatgccgtgctgagaaaattttggtggcaaatagaggagaaattgctgttcgtgttatccgaacagctcatgagatgggaataccatgagttgctgtttactttacaattgataaagatgcacttcatgtgaatctggctgatgaatcagtttgcatatgctaagcaccaaacagtcaatcgtatttattgtttccaaattgtgc

SEQ ID NO: 51815 - DNA, 218 bp, Gossypium hirsutum
  Clone ID: LIB3197-045-Q1-M1-G1
tgaagattacacctgcaaaggctgagcacatcaagcagtgcgggtgcccaagctgcagtagcaagagggctagagtttgaaagtagtaggttcagaaattgggctttaaatctatttaaaacgaaacagacaaggttggttttatagcctttttcgttacagtttagaagtaaaacagagcttggtccgtttagttgatgaatgaattttatgactgc

SEQ ID NO: 51816 - DNA, 374 bp, Gossypium hirsutum
  Clone ID: LIB3197-045-Q1-M1-G10
ggaaaaagccacgtcaagccgggtaagttgataggaagaaaagagtgtccgttggtcacatttgatctcccctacctggctttctattataaccagaagctgctgttttacaagaacgacggtggtggtgagttcgaggacaaggttgaaaagctcaaggaagggctgagggtggtgttagaggagttttatcagctaggaggtaagctcgggaaagatgacgatggggttcttagagttgattatgacgatgatatggatggtgttgaagtggtggaagccgtggcagaggggattaccgtcgatgaattgaccggtgatgatggtacgagctcatttaaggaattgataccttttaatggcgtcttgaactt

SEQ ID NO: 51817 - DNA, 81 bp, Gossypium hirsutum
  Clone ID: LIB3197-045-Q1-M1-G11
ggaaaaacctttccttatccatcgatgggaccggtactcttccttgttgcctccgttttaccctgaacgccatcgcttggc

SEQ ID NO: 51818 - DNA, 146 bp, Gossypium hirsutum
  Clone ID: LIB3197-045-Q1-M1-G12
atcgcagctaatatacagaggccatgatactgggcttgctggagattcatggctaatcctgtgatcacatccgtgcacagtcttcgtgagcgtttagatgacaccctccttgcccacaggaacgtgattttgggcttgctctcaat

SEQ ID NO: 51819 - DNA, 289 bp, Gossypium hirsutum
  Clone ID: LIB3197-045-Q1-M1-G2
aatcaaaccaactcaacctgatctgttaatttgattttaacccaaacatgtacacttcataaaatacatgcatggtacatactggaaggaaaagcaaaacaaatttttctaacgacaaatattattccttattcactcattaaatatagggcattggtcatttacttactacatcaatcaaagcttaaaaaaacataagacatgcatatgtttttgcattttccatacccacatacaaaatcataggaaaatgggtcactcgacccactcaccaatcatataatttttt

SEQ ID NO: 51820 - DNA, 384 bp, Gossypium hirsutum
  Clone ID: LIB3197-045-Q1-M1-G3
acagtacaagccgaaagaaatattgcatgatattcacgaccagcatggaatcgctgtttcttatatgcaagcttggcctgggtaggaacggagtatggctgcacttcatgggacttttgaggaagggtatcgtcttcttcctgcatactgtgagcaaataacgaaaaccaatccaggaagtgttgcatcagttgttgctactcgacaagaaaattgtttccagtgcctctttatttcttaccgcgcatctatctacgggtttataagtgcttgcagaccacttctggaacttgataaggtggatctgaaaggaaaatacttgggttcatggctttgtgctgcaccagttgatgcttatgaatgtctgtttcccttggcaattgc

SEQ ID NO: 51821 - DNA, 382 bp, Gossypium hirsutum
  Clone ID: LIB3197-045-Q1-M1-G4
actaggctaataagggagctcaatctatgaggctttgcgaggcaaagaaccaaacagtgctgacctattatcttacatgcacattctttatgaggtttgcccctacttaaagttaggctacctgtctgcgaatggagccattgcaaaggccatgaaagatgaagatagagttcatattatcgattaccaaatagctcaggggagtcagtggatcactctcatccaagcatttgcagctaggcctggtggaccaccccatatccaaataactggtattgatgattccacatctgcatatgcccgtggaggaagcctaaacattgtgggaaagaggctgtctaagcttgcaaggtattttaaagtgccatttgaattccatgct

SEQ ID NO: 51822 - DNA, 401 bp, Gossypium hirsutum
  unsure (1)..(401): unsure at all n locations; Clone ID: LIB3197-045-Q1-M1-G5
aagaaacttaccaggattcccctagtaacggcgagcgaaccgggaaaagcccagcttgagaatcggtcgccatcggcgtccgaattgtagtctggagaagcgtcctcagcgacggaccgggcccaagtcccctggaaaggggcgccggagagggtgagagccccgtcgtgcccggaccctgtcgcaccaagaggcgctgtctacgagtcgggttgtttgggaatgcagccctaatcgggcggtaaattccgtccaaggctaaatacgggcgagagaccgatagcgaacaagtaccgcgagggaaagatgaaaaggactttgaaaagagagtcaaagagtgcttgaaattgtcnggagggaagcggatgggggccggcgattcccccccggtcgatgtggaa

SEQ ID NO: 51823 - DNA, 432 bp, Gossypium hirsutum
  Clone ID: LIB3197-045-Q1-M1-G6
atcggagctaatatacagaggccatgagactcagcttgcttcagattcctattcacctaaaccggttaaaccatgggcctctgtcacgcgcgtggtccggtacatgctccgggagcagcgcctcctctttgtgctcgtaggcattgccatagccactctggtcttcaacatcttcccggcctcgcgtgctgcgcacggcccccacctccactccaccaccccgctccttgattctatcccctacttccccatcgagacccaaaacaagttctcctatgcacaccggctcgggttcgggtcgggcaatccaaccggttagaattccgttggggctgaagcggaaggggttgaaaatcgtcgtaacgggtggagctgggttcgtggggtcgcacctcgtggaccgtctgatagcgagaggagacagcgtgatcg

SEQ ID NO: 51824 - DNA, 420 bp, Gossypium hirsutum
  Clone ID: LIB3197-045-Q1-M1-G7
ccagtattagtctctgtgtatatatatctcacctcccatcccatctttgtctgctaaatttggctctcttactgaaatcaaataaaatgatgccccctcagcaagactagcaatatcaccacccataatactcctgcccccatcatgctcacaaccagccggatgacggagaatttcatttctgttcacgctcagccatcggcttcttcatccaccaacgtcgtcccatgttctccgcagcatcccatcccatcccaacaggacacgctaactccacttccattttcagtttcgtgtcaatctttacgtcctgtaactctcaagtttgaagaagtggcatacaccatccattccagtgtcacaagcgcaagttgtttctcctcgcataaaccccaacagagaacaaatgtactgaacggg

SEQ ID NO: 51825 - DNA, 428 bp, Gossypium hirsutum
  Clone ID: LIB3197-045-Q1-M1-G8
attttccttctgaagtacgaaaaaaaaaagagtacgaaatacgcttcaattttgacgatctctccaaatttctttcttgttttcctgatccatacgctatgttttcctccactatataaaagcagacgggttttgaactgggaagtgagaagttggtaataataggccaggaacgattgaaaatggaagcgaaaacgaacggaccgagtgtgaatgcgggtcgggttatggacgggccgacgaatccgatggtcactcctcttttaaccgatctttatcagttcaccatggcttacgcttattggaaagctggcaaacacaacgaccgagccgtgttcgatctatattttcgaaagaatccatttggtggtgaatttacagtgtttgctggtttggaagaatgcataaagctcattgctaatttcgag

SEQ ID NO: 51826 - DNA, 431 bp, Gossypium hirsutum
  unsure (1)..(431): unsure at all n locations; Clone ID: LIB3197-045-Q1-M1-G9
ctgagaactggtataatcttttgttacagtatagccactattctcttattttttaatgaagttgtaataaaagtttaaggttgttgaaaatcatttgacatatgaaaatcattatcttagagtaccgtactggtttgaagcatgaaagttttggtcaattcttttgatggaacttcaatttccattttattatctttctcttgaaagttgtgtgtctgagcaaaaaattctttgggccgttgagaaggtttggctttattggttctcacttttctcatggattgagctgtctttgacttactaatctgttcttgttggatcacaagctttatggaaaatagcacaaatatgttattntctgggcaagaaatagcgcaaatgatacttgcctgatgtctggtgacttttttgttagctggttgctcgaaaca

SEQ ID NO: 51827 - DNA, 419 bp, Gossypium hirsutum
  Clone ID: LIB3197-045-Q1-M1-H1
cggacgcgtgggcgaaccaaaacagagccttcccctaaacgggcatagagagaaaccagagaaataccacccaaaacctgttcaaacaaagctaaaaaaccatcaaccatagtagaagaggcaaaagcttgagagaaacaagaccgtggagattcagagtgaaccttttccattctcaagcttctgaaaaaaaaaaaaccttaatactatcgaatattgtcaaatccagttgttccagtccacaattgtcatcttctcaactggatctagggctttttcaacccaaaaacatggtgctcgataccgatgtcccttcttagccaacatatgggcagccttatttacttctcttgaaaaggagtgaaatcttaagggaaacccatttcagctggcaagagtaagactctctcgcaagccct

SEQ ID NO: 51828 - DNA, 368 bp, Gossypium hirsutum
  Clone ID: LIB3197-045-Q1-M1-H10
aaaaaagatggctttggagatctgtgtcaaggctgctgttggtgcccctaatgttcttggagactgtccattctcccagagagctcttcttactttggaggaaaagaagatttcctacaacatgcaccttatcaatatcagtgacaaacctcaatggtttttggagataagtccagaagggaaagtaccagtggtgaagtttgatgacaaatgggtggctgattctgatgtaattgttggaatccttgaagaaaaatacccttaagccttgtctcaaaacccctcctcaatttgcctctgttggatcaaacatatttggaacttttgtcacatctttgaagagcaaagacgctaatgatggatctgag

SEQ ID NO: 51829 - DNA, 427 bp, Gossypium hirsutum
  unsure (1)..(427): unsure at all n locations; Clone ID: LIB3197-045-Q1-M1-H11
cttgtttaaaatataagaaaaaaaatcatacgcaatgagcactgctggtcaggttattcgttgcaaagctgcggtggcatgggaggcggggaagccactatcgatagaagaagtggaagtggcaccaccccaaaagcatgaagtccgtattaagattctcttcactgctttatgtcacactgatgtatactactgggagtgtaagggttacactcctctgtttcctcgtatacttggtcatgaagcctcanggatcgtggagagtgtgggtgagggtgtgaatgatttgaaacctggagatcatgtgctccctatcttcaccggagaatgcaaagaatgtcgccactgtctgtcagaagaaagcaataacatgtgcgaactgcttangatcaactgcgaccgangtgttatgcttgctgatgggaaa

SEQ ID NO: 51830 - DNA, 162 bp, Gossypium hirsutum
  Clone ID: LIB3197-045-Q1-M1-H12
ttttgactctgctaactgctgattgagtgccggccgtttcttaaacagatctttttaatcgctctttaatcttaaatttctttggctctcccattcgattttgaaagggcggaatcaaagtctttgaggaaacctgtttttaccaaggtggaccaactccgc

SEQ ID NO: 51831 - DNA, 358 bp, Gossypium hirsutum
  Clone ID: LIB3197-045-Q1-M1-H2
catttgccttaatcatcttcctctttctttaaaacctcttcctatttaatttccgactaaacttgcgctgaattccatggctactgcagaggttgtatcagctcagactgcaatccatgaggagaaacctgaagaagtggtcaaggttggagaaattgcaacagaaagaggtaccggctgttgctcctgcagcagaacctgttgctgaagaaccaaaggaagcagtgcctgaagcagcatccggagaaccccaggctccagaaactgaagccacagttgaaactgaatcaaaggaggtggttaaagagcccaaggctgtgactgaggagccagaagttgagaaaaaagaagaagagac

SEQ ID NO: 51832 - DNA, 339 bp, Gossypium hirsutum
  Clone ID: LIB3197-045-Q1-M1-H3
ggttgctcatctttcaatgacaaagttttcaagtatgaatttagtccagtatagtgcaaaagaggctttaagccatgattttgctaatactggatcaccattgtacactagaataaataagaggctatggagtgctgtgaggtctatggagtccttgctaccacatgcaaaccccagaagcagctatgctgttacagatgaaaacactaatggtttcatctatgcaaaaatatttggtggattcgagaagataagatcttcgatctgtgatcttgtcaccatatccaggcttctaaatgctactcttgtaattccagagatacaacaaagtacccgctc

SEQ ID NO: 51833 - DNA, 429 bp, Gossypium hirsutum
  Clone ID: LIB3197-045-Q1-M1-H4
taaacccctccattcattatttacgttaagttcaaagaaatggctaatcctgtgatcactcgcgtccacagtctccgtgagcgtttagatgagacccttcttgcccacaggaacgagattttggccttgctctcaaggatcgagggcaaaggaaaaggaattctgcaacaccatcaaattattctagagtttgaagctatccctgaagagaacagaaagaagctcgctgatggtgcattttttgaagtattgaaggctagtcaggaagcgatcgtgttgcctccatgggttgcacttgctgttcgtccaaagcctggtgtttgggagtacattaaagtgaatgttcacgcccttgttgttgaggaacttactgttgctgagtatctccacttcaaggaagagcttgttgatggaagttcaaatggaaac

SEQ ID NO: 51834 - DNA, 430 bp, Gossypium hirsutum
  Clone ID: LIB3197-045-Q1-M1-H5
ctctttttaagctgatatgcctgtctttcattcaagtcataatcaaatcaaatctttgatgcaaatatagttctttagcgacctttcggtaagacaatcttccaaagatgctcggtgcatcggaatattattcattgggaagaggatctaccattaattactacacgcctcaagctctgcaacaactgagaagattctactctgcaattaaaaaggaatcaccacgagttctacattaaggtggatttgatgattttctttgagttttggtgctaatccatgaagaatttttactggtttaagcaaatctcaaacaatgttaagtcagagaggaggctttctcttggggaatacaaaagagcagtttcttggtctaagtatttggtttcctctggcggtgagataaaaggagaaggagaagaatggagtg

SEQ ID NO: 51835 - DNA, 236 bp, Gossypium hirsutum
  Clone ID: LIB3197-045-Q1-M1-H6
atgaaaaaattttttaccaagataaaaaattttctttttttttttttggacacaaaaaaaaaaaaaagttatttaaaaaaaaaaatattgttattagggacaaacttttggaaaaaaaaaaataaaatgttaattaataaacgctcggaaagatattaaactgaaaagaaaaagtttactgctttaaattaacaagtttaaaaaaaaaaagagggttctaacataactatttagaa

SEQ ID NO: 51836 - DNA, 430 bp, Gossypium hirsutum
  Clone ID: LIB3197-045-Q1-M1-H7
ggcggctattcctttggggttgcaacaaagggatgtaattgggattgcagagacaggatcaggtaagactgctgcttttgttttgcctatgttagcttatatatctagattacctcctatgagtgaagagaatgaagctgaggggccttatgctgttgtaatggctccgactcgtgaacttgctcaacaaattgaggatgaaaccatgaagtttgcacattatttaggtattaaagttgtttcaattgttggtggtcagtcaatagaggaacaagggtttaggattagacaaggttgtgaggtcgttattgcgacccccggtcgtttgctcgattgtttagagaggcggtatgctgtgttgaatcagtgtaattatgtggttcttgatgaagctgataggatgatagatatgggttttgaaccccaagtt

SEQ ID NO: 51837 - DNA, 415 bp, Gossypium hirsutum
  Clone ID: LIB3197-045-Q1-M1-H8
cccacgcgtccgattgaaaggctccctttcagacaatctaaactgtgggagaaaccttgagttcgttgatatatcaaacaataggttaatgggaagcttgccttcttgtttaaactctgaaacaagagataacagagttattaagttcagtggcaattgtttttccattgccggacatcatcagcatccagaatcatattgcagagaatttaaagttcatgtttataagagcagtaatggtggcaagggcataggagtattggttggtctcattgttggaattgcagttctcattgttcttgtggctattggctttctcattgtgtgtcgaagatactgccctcgagtgagatcggagcaacatttactgcagaaatcagtaccagagaactcaacagcagggttatcatctgag

SEQ ID NO: 51838 - DNA, 434 bp, Gossypium hirsutum
  Clone ID: LIB3197-045-Q1-M1-H9
ctaaagatcaaagactcaaagagaaagaaagcggccatggagaaggaaagagagcaacaagtttacttggcaaggcttgctgagcaagctgaaagatacgatgagatggttgaggccatgaagagtgttgctaagttggatgttgagctgactgtggaggagaggaatctgttatctgtgggatataagaatgtgattggagcaagaagggcatcctggcggatactgtcttcaattgaacagaaggaggaggccaaaggtaacgaacaaaatgtgaagaggataaaggattataggcaaagggtcgaagatgaactctcaaagatatgcaatgacatactctcagtcattgataagcacctcattccatcttcctccaccggggaatcaactgttttctactataagatgaaaggagattattttcgttattt

SEQ ID NO: 51839 - DNA, 394 bp, Gossypium hirsutum
  Clone ID: LIB3197-046-Q1-M1-A10
cggacgcgtgggatttaattttctgcgtaaaaattaaaagaaaatatagggaaaaagaacaggagaaaccctaaccatgcgattagggtttgggattgaaattgaagcgaagcgaagggattgttgaaattcggattattggaaattggggaattcgacagaaatgggaagcgaagacgctgacagtgataagagtaagcaatggtcgtctccaaacagggcttataaagggaaggaggaagaccccaaactttggggacttttcctctttggtttaattggcgccactgccaccactttcgctgttagtcaactgaagaaatcttgtgattggatgtttgctcagttagccaggtctcaattatctcaaaggggaggttcttttcgaacattc

SEQ ID NO: 51840 - DNA, 436 bp, Gossypium hirsutum
  Clone ID: LIB3197-046-Q1-M1-A11
ctttgttcctcatcctctgatccgtctcttcccgcattcgtcccgccggatttaacaagttttcaaacgaaaaatgagggaaatccttcacgtacaaggcgggcaatgcgggaaccagatcggatccaagttctgggaagtggtttgcgacgagcacggcattgaccctaccggacgctataccggaaactccagtctacaattggagcgcgttaacgtttactacaatgaggcttcttgtggaaggtttgtcccacgcgccgtgctcatggatcttgagcccgggaccatggatagtgtgagaaccgggccttatggtcagatctttaggcccgataactttgtcttcggccaatctggagctggtaataattgggcctaagggcattatactgaaggacccagcctaatggatctggtcctgaaggtggcaaaa

SEQ ID NO: 51841 - DNA, 369 bp, Gossypium hirsutum
  Clone ID: LIB3197-046-Q1-M1-A12
gtgaggttctacaaggaggaagagaagaatgatcctgaattcgcaaagaagctagcttctctcgctgatctctatgttaatgatgcatttggcactgcgcacagagcccatgcttccacagagggagtggctaagtacttaaagccttctgttgctggttttcttatgcagaaggaactcgattatcttgttggagctgtggcaaattccaagaagccatttgctgcaattgtcggtggttctaaggtatcaaccaagattggagtgattgaatcactcttggccaaggttgatattctcatactgggtggaggaatgatgtttaccttctacaaggcccaaggatatgcgggtggatccttaacttgt

SEQ ID NO: 51842 - DNA, 340 bp, Gossypium hirsutum
  unsure (1)..(340): unsure at all n locations; Clone ID: LIB3197-046-Q1-M1-A2
agatgatccaaatgggttttattgttttggccttgatggtggtttccgccgcgacggtggttacggcggctgacgagagtgggttagcgaatgagtgcagcaaagatttccagagcgtgatgacttgcttaagctttgctcaaggaaaagcagcgtcgccgtcgaaggagtgctgtaattcagtggcggggattaaagagaataaacccaaatgtttgtgttatattttgcaacaaacacaaacctctggtgctcaaaatctcaaaagcttangtgttcaagaagataagcttgttcagttaccatcggcttgtcaattgaagaacgctagcgtcagtga

SEQ ID NO: 51843 - DNA, 336 bp, Gossypium hirsutum
  Clone ID: LIB3197-046-Q1-M1-A3
gttaagcaggaacaacaacctccagcagaggagaaaacaaaagacaaggtggaggagaagcctgccgaagaaaataaagaagaaacggccccaccggcaccggctacaccaacctcttttgtattggttggggacttgcattgggttggatgtgcaaagaaaatcgaaaaaaccatcatgaagatcagaggtgtggaaggagttgtgatcgacatgctcaaaccaagtactataaaggatatcgacccagctttgtctaaatatgaaaaccaaagactagtctttcttgctgactagtgactatctgagtgtctacagtaggatacaccggactac

SEQ ID NO: 51844 - DNA, 385 bp, Gossypium hirsutum
  Clone ID: LIB3197-046-Q1-M1-A5
ccctcgtcttgattttttcatcaatggccaagtacggcgaaggcgacaagcgctggatcgtggaggaaagacccgacggtgctaacgtccacaactggcactgggctgaaaccgattgcctcccctggtcgaaaatgttcttcaccaaatcgctttcggatctcaccatccttgacggccaaggcaatctccgcatcaagaccaagaaggtcgaaaaggtcgacggcgaagcctatgttaatattcgcaagggtaaagtcattcccggatatgaaatcagtttgagtgtatcctgggaaggcgaagccaaagatggggaagggaagacgctgttgaaaagctgaggtaacctcgagaatccgtacatttcggatgaaaatgctga

SEQ ID NO: 51845 - DNA, 398 bp, Gossypium hirsutum
  Clone ID: LIB3197-046-Q1-M1-A6
cgttgttcgatctcccaaacactactgactttgacgggtttcacaacgaacctatccatcatggtaaaacctgctaacggtaccaccacgctcgctttcatctttaatgaaagcgtcagggctgccggtgattctatagctagcatgggaggctatatctatccacagacactggacaaacttatcgatatccatccttacatgcttggagcaatggctggaggagctgctgactgccaaatatggcacagaaatttaggcatcaagtgccggctacatgaattagcgaacacgcgtaaaactatacctacaagggcttcagaactactcgcgaacattctgtatgcttaccgaagaatgggaccttttggtgggaccatgattgctaggatgcatga

SEQ ID NO: 51846 - DNA, 371 bp, Gossypium hirsutum
  Clone ID: LIB3197-046-Q1-M1-A7
gagatctctctttgtttatttacctccaaaaatggcatccttttactcgctaactttgattttgatttctattttcgctttctcaatctccattgctaactccaaaactctcaagagagatgtaaaagccttaaatgagattaaagcatcacttggatggagagtggtatatgcatggattggagatgatccctgtggagatggtgatttaccaccttggtctggtgtaacatgttctactcaaggagactatagagttgttaccgaattggaagtctatgcagtatcaattgttggtccttttcctattgccgtaaactaattgttggatttaacaaggcttgatctccataacaacaagcttacgggcc

SEQ ID NO: 51847 - DNA, 386 bp, Gossypium hirsutum
  Clone ID: LIB3197-046-Q1-M1-A8
gttttaccagctctagcctccatgtgactgcgctcacagggaaaaaaaaaccctcttatttggctctgtcaaaattaagaatcctcaataaatctcaaagaaaaaatggaagacagcgcagagttggagtcgatcctgccctatctaccgttagtaattggatcttcgaggcgactgttatggccatcgaaagtggttgaggctctggaggcgatgtccagaggtcctgatcacagcctagtcaactgtggcgaagtcctctccatcgccatttccgacatgagagcttctctttccctcgctgaccctctcgctctctctgcccccctaggctatgccctcttctttgatgagctcatgtcccggggccgactccagaaaaatgg

SEQ ID NO: 51848 - DNA, 218 bp, Gossypium hirsutum
  Clone ID: LIB3197-046-Q1-M1-A9
gtccggtgcgcccccggcgggccttgaaaatgcggaggaccgagtgccgttcgcgcccggtcgtactcataaccggattaagggttcaaggggaacaacctttggtcaatggaacaatgttagccagggaaggtcgcaaaatggatcccgaaccttcggaaaaggattgggttttaaggcctggcaccgggggtccaatccccaaccccgtgggtggc

SEQ ID NO: 51849 - DNA, 417 bp, Gossypium hirsutum
  Clone ID: LIB3197-046-Q1-M1-B1
gcggggacacctgggcttctttacatgcaccatgagtattcaccaggggcagggaaatctatacttcattcgaacagacaccatactgagtggaaaggttcgatgcaagctttgtttttgatgtgccattactttgcagcgaaagagatctataatgctatccaagttttcattgcggattatgtgtggatgactggatctgggaacttctcatattatcatgtaggcgaagattccatgcttgctaggtttcgcacagatgatatgaccactaaatttcttttttttgctgtgccagaactcaataatacttatatgttgtgctatatatgcccaatgcatactctggtctgttatggtttttggagcactcggtatataaaatgacgacaactagaaagggtcagtcatggctct

SEQ ID NO: 51850 - DNA, 398 bp, Gossypium hirsutum
  Clone ID: LIB3197-046-Q1-M1-B10
tgaaataaacatacaaacaagcagtctcaatttttgttgaagtcctgataaaatttattattaatttatagtttaatctctcctcgtccagaaaagaagacccagaaggtttctcttcttttctcattgtcggttccttcgaaatccctggcgaagtttatctcaactcggtagagcaaaatgatgaggctgcgaacatatgctggtctcagtttagtcacgacactagcagttatatatcatgcattcaacagcagaggccagttttatcctgctatggtttatttatcaacctctaagatcagcttagtgttgcttctcaacatgggccttgtagttatgtgtatcttatggcaattaaccaaacggctattccttgggtctcttcgaaaagctga

SEQ ID NO: 51851 - DNA, 389 bp, Gossypium hirsutum
  Clone ID: LIB3197-046-Q1-M1-B11
cggacgcgtgggtttacgttgacaaatctgcctttttcttctcaataccaaaagttttctagcagatcgccacaaagggaattttgaaccttgtggggggttgtttttaatagaaaaggtgaaccatggggaccccggaaacgtcacgggagccatgccctgatcgaattctcgacgacattggtggtgcttttggcatgggtgctgttggaggtgcagccttccacttcttgaaaggcacatataactcccctagtggttctcggttgctcggaggaactcaagcagtgcgtatgaatgcccctcgtgttggcggtagttttgctgtttggggtggtctgttttccacctttgattgcactatggtctacgtccgacagaaagaagat

SEQ ID NO: 51852 - DNA, 432 bp, Gossypium hirsutum
  Clone ID: LIB3197-046-Q1-M1-B12
cggacgcgtgggaaagtgggttgtgcaaggagctattgatgttgacattggtgccaatccttcagccgaagatgctgatgaggatgaaggtgttgatgaccaatctgtgaaggttgttgacattgttgacactttcaggcttcaggagcaaccccctttcgacaagaagcagtttgtcgtgttcatgaagaagttcatcaagaacttgacaccgaaactggatgcggaaaagcaagagtccttcaagaaaaacattgagggagcaaccaagtttttgctttcaaaattgaaggaccttcaatttttcatcggagagagcatgcacgatgatggatgtttggtatttgcttaatacaaggaatggggctgttgacccgacatttttgtactttgcgtatgcattgaaggaggtcaagtgctgaggtttgaagc

SEQ ID NO: 51853 - DNA, 456 bp, Gossypium hirsutum
  unsure (1)..(456): unsure at all n locations; Clone ID: LIB3197-046-Q1-M1-B2
cggacgcgtgggagagaaaggaattttgcaggtcttgttggacgtaaggtttgctgctgatgttctttctgggggtgatttcaatgtaaatgaagagttatctagaaaaccgaagtctaaatcatcattcagaaggaaggaccaagctcagactaagtctgttgttagagatgctgttgatgggctgatccattctctttcgcaaaagttggatcccattgattggctgacgtatgagccatacttatgggagaatgagaagcagtcatacctcangcatgctgtgctctttgggttctttgttcaacttaatcggatgtatacagatactgtacagaaactgcctactaattctgaatcgaatattatgagatgttctgtggttcctcgtttcaaataccttccaatcagtgccccagcattgtcttctagagggaataatgggaaacctattat

SEQ ID NO: 51854 - DNA, 388 bp, Gossypium hirsutum
  Clone ID: LIB3197-046-Q1-M1-B3
cttttgcgctttcaaacgttttcatcttttacccctttttttcccccaaaattgataaattggttgtctgtttctgggagaatgaaaatgtattgaaatattaaataaaatatatattgggttctatatcattctcccactcgtagctctagcgttcatttaatttttctattcgtttgacaataactgactttatagttttcaaaccgcattgctggatgattgtgggcttgtagcacagcaatgagtggagtaaaaaagtctacctcagcaaaaataacattgaggggcttattgaatcaacctgataatcgcacttgtgctgattgtggggctccaaatccaaagtgggcatcagcaaatattggaatctttttatgcctgaaat

SEQ ID NO: 51855 - DNA, 272 bp, Gossypium hirsutum
  Clone ID: LIB3197-046-Q1-M1-B4
aacgtgtgcaagtgcatcaaatcggcggtgaacggaattccgtacaccagcaataacctcaatctcgcagccggcctacctgctaaatgtggtctccaactcccttacagcatcagcccctccactgactgcaacaaggtgcagtgaggttgatgatgatgatatggaaggagtggaaaaaggttccagctcagctagataaagtagctagctaagggtaaataagctgggttggtgtgttggtttttaaaaaattccatatataatcgggg

SEQ ID NO: 51856 - DNA, 459 bp, Gossypium hirsutum
  unsure (1)..(459): unsure at all n locations; Clone ID: LIB3197-046-Q1-M1-B6
cccacgcgtccgggtgtgcatacgcaaggcgaccatggacgacctactggctatgcaagcttgcaacttgctttgccttcccgagaattaccagatgaaatactatttctaccacatcctctcttggcctcagcttctttacgtcgccgaggactacaacggccgcatcgtcggttacgtgctcgctaagatggaggacgaaagcaacgagtgccacggccacattacctntgtcgccgtcctccgcactcaccgcaagcttggcctcgccactaagctcatgaacgccgcccaagccgncatggagcaggtgtttggagcagagtatgtgtcgctgcatgtgaggaagagtaacagggcagcgtttaatttgtatacccagacgttgggatataagaattaatgatgtggaaggccaagtattatgcagatggggaggatgcatatgacatgagggag

SEQ ID NO: 51857 - DNA, 362 bp, Gossypium hirsutum
  unsure (1)..(362): unsure at all n locations; Clone ID: LIB3197-046-Q1-M1-B7
aaagaattgaagaaattatggcagagaaaccacaaccagtgaaagttttatattgtcccatatgttctcttccagcggagtactgtgaattcggccctgatttcgaaaagtgtaaaccttggttgatcagcaacgcccctgacctttacccacatctcctcaaagaggctaatgaaaaggagggtgagaaggtttctgaacagctgcaatcagttggtatttcctctgctgctgaaggggcagcatcttcagctccaccagggagcacagtgtcatctaaacaagaagatgtaaaacgtcttcctgggggaaaattaaggaggaaagagaaacangaagttgtcattgaaaaggttgtacgt

SEQ ID NO: 51858 - DNA, 231 bp, Gossypium hirsutum
  unsure (1)..(231): unsure at all n locations; Clone ID: LIB3197-046-Q1-M1-B8
aacaaacttacnaaatcgcgtggggttttatgggtttttggttttggcttacaagacggtataatggagaaatggagtcgacggaatcatcttacgtgtcatcaccggaggctgcgagaaatagatctcctccggcgtctaaatagccgacttctggaaatgtggagaagcctatgtatataatggttcttgtctccaatgctgcggctggttctgtaattggatagggtg

SEQ ID NO: 51859 - DNA, 380 bp, Gossypium hirsutum
  Clone ID: LIB3197-046-Q1-M1-B9
attttattgttccttccttcgccgtctactgcacttgtgacatcgatttcaagtgaatcagaatgggtaaggaaaagagtcacattaacattgtggtcattggccacgtcgattccggaaaatcgaccaccactggccacctgatctacaagcttggtggtattgacaagcgtgtgattgaaaggtttgagaaagaagctgcggagatgaacaagaggtcattcaagtatgcttgggtgcttgacaagctcaaggctgaacgtgagcgtggtatcaccattgatattgccttgtggaaatttgagacgaccaaatactactgcactgtgattgatgcgcctggacaccgtgactttatcaagaacatgattactggtacc

SEQ ID NO: 51860 - DNA, 458 bp, Gossypium hirsutum
  Clone ID: LIB3197-046-Q1-M1-C1
acaaaagccaatggcctccttatccttcctccacctctcctccgccacccgttttaccccccgcgccacccctattaaccaccgggctcgaacccagaaatcattctccatcaggtcccaatctgccccagtcctttcccaagatgagctcaaaaagcttgcagctgacaaagcggttgagtcagtcaagtcaggtatggtcctaggcctaggaacaggctcaacagctgcctttgtggttgacaaactgggtcaactcctttccaccggtcaactttctaacatcgtcggaatcccaacctcaaaaagaacccaagagcaagctgcatcgcttaatatccctttatccacccttgacttgcatccccatattgatctcgccattgatggtgctgatgaagttgaccctaacctcgacttatttaaaggccgtgggggtgcacttttgcgagagaaaa

SEQ ID NO: 51861 - DNA, 366 bp, Gossypium hirsutum
  Clone ID: LIB3197-046-Q1-M1-C10
cttcagtgtctcactctctccgtgcttcactccagtttctcctttccctcttcgaagaaaaaatgcgtgagatccttcatattcaaggtggccaatgcggcaaccaaatcggagccaagttctgggaagttgtttgtgctgagcatggcatagatgcaactgggcgttaccaaggagacttggatcttcaacttgagcgaatcaatgtctactacaatgaagccagttgtggtagattcgttcctcgtgctgttctcatggatcttgaacctggaaccatggacagcatcagatctggccctgtcggtcagatttttagaccagataacttcgtttttggtcaatctggggctgtaacaactgggc

SEQ ID NO: 51862 - DNA, 368 bp, Gossypium hirsutum
  Clone ID: LIB3197-046-Q1-M1-C11
tgccctgataatgctttccaggttgctcttcctggtacttcgtattcacttttgcagagattaggagcagtaatgcgtaacggcgcaaagctttttgcagtgggcaccacttcttcgctggttgggacagccatcacaaatgctttgattaatgctaggaaggccgttgataagacatcggcagctgaagttgaaaatgttcctatactatccaccagtgttgcctatggtgtatatatggcagtttcgagcaacctcaggtaccaagtgctggctggtgtaattgaacaacggattctggagcctttgttggaccagcacaagcttatgtgagtgcaatatgcttttccgttagaacaggcaacaca

SEQ ID NO: 51863 - DNA, 426 bp, Gossypium hirsutum
  Clone ID: LIB3197-046-Q1-M1-C12
gttttggctattgatgatgagactaaggagagaatcgggtcttcttcccatgttgggttggccggacctgatggagacttgatcgccattcttaggagcattgaaatctacaagcataacatagaagaaagaattgctagaacatggggaacaactgcaccaggtttgccatacgtggaggaagtcattattcctgctggaaactgtctcattggaggtgacctagaagttttgaaacctgtaaaatataatgatgggcttgatcactacagactttcccccaagcaactcagaaaggaattcgataggcgtaatgctgatgctgtttttgcttttcagctaaggaatcctgtgcataatggacatgcactattgatgaatgattcctcggagacgacttctagaaatgggtttcaagaatccaat

SEQ ID NO: 51864 - DNA, 204 bp, Gossypium hirsutum
  Clone ID: LIB3197-046-Q1-M1-C3
gtccacgccgcattctaaaagagacctgctcgaataatatacatagtgcgaacaaggcggaaagaagcatttacattatctaaacgcggatctaaacagaaagagcaaagaccatggtacattatcactctgtaagagagaaggtaccatttctaagaaggaaataccctgcaactcaactcatattacgcatcccccatccta

SEQ ID NO: 51865 - DNA, 335 bp, Gossypium hirsutum
  Clone ID: LIB3197-046-Q1-M1-C5
cccacgcgtccggaaaaagtgaacaagataaaataaacaaattccctcacttttcacactcacagttcctactttccaatttccttaataatacaaacaaaaacataccaaactattttcctctgaatttctcatctttccctgcaccgatctgcctttacttagtttctacatttccttctctcttttatttttttctcgggttttcttggtagttcactgaggtccttttaatagtcattcgtttttttttgtgtgtgtgtggggaaagaattggtacgcatttgagaagaagctgaaatggaaactgggtcgaactcagattcactagcaaa

SEQ ID NO: 51866 - DNA, 392 bp, Gossypium hirsutum
  Clone ID: LIB3197-046-Q1-M1-C6
cggacgcgtggggttttactcattaacaccacgacagactagctcagtcagcttgctcatgatatgctcgatggttgctcgatatgctcccccaatttcgtacaactttctcaatctcattagccttggtggtaaaaagaccatatttgaaaagcgtatggggaacattgatgatgctgtacctttctttggagaaggattcaacaacatctatccacttatcatggttgtttacaccttgttagttgctagcaatttctttgatcgtgtagttggtttctttgggaactggaagagacttagatttcaaactgaggctgatgatatggatggatttgatccctcaggactaattatcctgcaaaaaagaacgatcttggcttgaacaagga

SEQ ID NO: 51867 - DNA, 377 bp, Gossypium hirsutum
  Clone ID: LIB3197-046-Q1-M1-C7
cgccgccaccaccaccaccgccaccaccaccaccaccaccaacccattttctctttcatctccaccgctcaaaatgtctcttcaccatttgctctttcccattctaatactcgcattctccactgcttcttcattagctgccactgcaaaagaccaaactttaaacactcatcaagctgagttctttaaccccaagcttccacccagaatcctttcctcttccaaaaagttcgaaggctcatcggacattgtccacctccgttaccacatgggtcccgtcctttcctcgtcgccaatcaatatctacctcatttggtacggtcgttggtctgtttcccaaaaactcctcataaaaacttcataaactcaattttccc

SEQ ID NO: 51868 - DNA, 393 bp, Gossypium hirsutum
  Clone ID: LIB3197-046-Q1-M1-C8
gttgccgctcagttaactgaagaagaagctgagaggctaaaacaagaagatggtgtagttgctatacttccagagaccaagtatgaattacacaccacaaggagtcctatgttccttggattagaaccagaagaaagtactagcatctggtctcaaaaacttgcagatcatgatgtcatagttggggtacttgacactggaatttggccggaaagtgctagctttaatgatacagggatgacaccggttcctgctcactggaaaggaacatgtgaaactggacgaggctttcaaaagtatcactgcaacaagaaaattgtgggtgcaagagtgttctaccggggatatgaaactggcactgggaaaatcaatgagaaaaacgaatattaatca

SEQ ID NO: 51869 - DNA, 86 bp, Gossypium hirsutum
  Clone ID: LIB3197-046-Q1-M1-C9
tcgccactcgtccgctcaatcgtgcatgaattcacctgcaagagtgcaccaaatgaatcagcttcttcttattattccttacactc

SEQ ID NO: 51870 - DNA, 444 bp, Gossypium hirsutum
  Clone ID: LIB3197-046-Q1-M1-D1
gcgggcctacgcattcagtttctcgcccactaaatcgagaatggaattaccggaagagtgctgggaatgaatattcagtttcttagaacgccatcgctacttggagcctctttctttagtcctgccaagattcttttccatcaccaatcatctacgtagcagactcaccatcaccgaccctacccttgaatccctacctcatctccttctacggtttaccaatctgaccaccatggcttttcgtgatttccacggcaatctcgattccgggctttccctcatttgtcagcctgggctggccttgacctccctcgacgtgttctgacacaagtgtttccctttactgggtttgaaatgcttggcttccaaaattaggattgtgacggaattgaattgctccaacattgggtctttgaaagactctgatttgattgagatcgggaa

SEQ ID NO: 51871 - DNA, 453 bp, Gossypium hirsutum
  Clone ID: LIB3197-046-Q1-M1-D10
gaaggatgcctatgtaggagatgaagcacaatccaaaagaggtattcttactttgaaatatcccattgagcatgggatcgtcagcaactgggatgatatggaaaagatctggcatcatacattctacaatgagctccgtgttgctcctgaggagcaccctgttcttctcacggaagcacctctcaaccccaaggccaacagagaaaagatgactcagatcatgtttgagaccttcaatgtacctgccatgtatgttgccatccaggcagttctttctttgtatgccagtggtcgtacaacaggtattgtgctggattctggggatgggtgtttctcacactgtgcccatctatgaagggtatgcccttcctcatgccatcctccgtctagaccttgcctgtcgtgatctcactgattctctgatgaagattcttactgaaagaggttatatgt

SEQ ID NO: 51872 - DNA, 392 bp, Gossypium hirsutum
  Clone ID: LIB3197-046-Q1-M1-D2
cggacgcgtgggcggacgcgtgggttccattggactttgttttagttgccataacgtcaccttccaatacaacccacaatgaggcaacaatatgtcttcactactctcacgttgctcatcctgttttccctcagttgttcaacaacattagcccaatctccggcactggccccggcaccttctggcccgacaaacgtcaccaagatcctcgaaaaagccggtcaattcaccctcttcattcgtcttctaaagtccactcaagtggccaaccagctgctcggtcagctcaacaattccaacaatggtatgaccgtttttgcaccaacggaccaatgctttctccagccttaaatcgggcacattgaattcactcaccgatgaacaaaaagtgc

SEQ ID NO: 51873 - DNA, 386 bp, Gossypium hirsutum
  Clone ID: LIB3197-046-Q1-M1-D3
cgcagtctctcccgctccttctcgctgcgatggcgtcttcaagatctcagttctcaaatcgtagcgctcttttctatcaagccatggctctggtcttgcatgcaggaaaaacaaacaaaaatgcctttaaggcactcattgctgcagaatatagtggtgtgcaggtcaaaatggttgagaattttgagatgggtgtgtcaaataagactcctgagttcatcaagatgaaccctttggggaaggttcctgtgttggaaacacctgagggtcctgtatttgagagcaatgccattgctcgttatgttgctcgctcaaaggttaacaaccctatatgtggttctacattgattgattatggtcatatcgagcaatggattgattttgca

SEQ ID NO: 51874 - DNA, 242 bp, Gossypium hirsutum
  Clone ID: LIB3197-046-Q1-M1-D4
gcccttcggccccgttccactctaataacctgtggcccaacacggtggggactcaggctcacggcgtttcatagaattcttttgaatttctccttataattgatcttataattttttggttagtttttgaagcccaagagggatgggatcggagctaatatacagaggccatgagactcaacttggcttcagattcctattcacctaaaccgggtaaaccattgggccttctgtctacgcgc

SEQ ID NO: 51875 - DNA, 201 bp, Gossypium hirsutum
  unsure (1)..(201): unsure at all n locations; Clone ID: LIB3197-046-Q1-M1-D5
ttttttttttttttttttttttntttgntttgttatttttaagggggtttatatattaatttattttttattttattttttnttaaaaattataaaaaagagcgaaatttttttaaaaataccaaaaaaaatttttttaaaaaaaaattcccttttataaaaaaaaattgtattaaatcttaaaaaaatttttttgtcccc

SEQ ID NO: 51876 - DNA, 397 bp, Gossypium hirsutum
  Clone ID: LIB3197-046-Q1-M1-D6
caacgaaaatatccacaggtatttccacggatttctactttctccaaatccacagatccattttcacctatggctccagtagcagcagcatcttcagattctataaagcctagagatgtttgtgttgttggtgttgcacgtactccaatgggtggatttcttggctctctgtcatctttatctgccaccaagcttggttcgatagccatagaagctgctcttaaaagggcaaatgttgatccatcacttgtgcaagaagttttctttggcaatgtactcagcgcgaatttgggacaggctccagctagacaggctgcgctaggtgcaggaattcctaactcggtcatatgcaccactgttaacaaaagttgtgcatctgggatgaaagcaacaatgc

SEQ ID NO: 51877 - DNA, 385 bp, Gossypium hirsutum
  Clone ID: LIB3197-046-Q1-M1-D7
cggacgcgtggggccgaaactgtcgtttacatctaacacaaaaatagaaaaaaagttatttcgctttaaaataatataaataaataattgtttttatttttattttttaatttcaccgctactaagaactaatccttttcattctggtttttcgacactccaaattttcagatttcctttcctttctcaccggaaaatgaaaaacatgggcgactttccgacgtttctagtcgtcgcacttttgatcttcagttgtctttcctatgttagatccgacgcttccgatcaccgttacaaggacggtgacgctgtacctctttacgccaataaggttggcccctttcacaaccccagtgaaacctatcgctacttcgatctacccttc

SEQ ID NO: 51878 - DNA, 447 bp, Gossypium hirsutum
  Clone ID: LIB3197-046-Q1-M1-D8
ttctaggctccctcgctccctacgagctcaaaaatgaaggtatccacggaaagaacacaacttcttcggagatagcgaactcttcaaaaccagacgatgagttgtgggtcctgtttatatctgtcttattttggtactttaatctcctgtggtactaatcggtctgctccagcttctctgatgaagcgaaaaatctattgtaaagagttggtggaaatggcacttttctttcttgccttataccactcctgccctggggcaagcttagccatccttgtggcaggagccctacaggtactggaaagctgactactggcagtgaaatgtcatataaagacggctgacatcaaaataacgattggggatttagctatagcagacttctttttttctccttctcccaagctcttccattcttgataggctttccctagctggcactatttt

SEQ ID NO: 51879 - DNA, 360 bp, Gossypium hirsutum
  Clone ID: LIB3197-046-Q1-M1-D9
cccacgcgtccggccttaccatttgaatctgaagccctccagaatctcaatccattttcatttcttcactacaacccaagatccaacccaagatttaaacaatgcgccacctcaacagcaagaacaacatgttcccaacaatcgcagaaccccgcgaggtaagactcggaaccctgagaaagttgaggatatcatttgtagaatgatggagaaccgggcttggaccacccgcttacagaactccatccgtgctttagtccctgaatttgaccatgctttagtttataacgttctccatggtgctaagaactccgatcatgccctccagttcttccggggggttgaacgggctggattgat

SEQ ID NO: 51880 - DNA, 191 bp, Gossypium hirsutum
  unsure (1)..(191): unsure at all n locations; Clone ID: LIB3197-046-Q1-M1-E1
aaacactcctcttaaattcaacattntgatttcatcgcccactgtcgatttctaaaaccctaaaccctaattagtttaaaatctccatcaatcaaaaaaaaaaaaaagccaaatcaaaaactctaaataaaatgtcttccattgttcttagatcgcgaacaatttcaaataatttcagttcaaagagtatt

SEQ ID NO: 51881 - DNA, 407 bp, Gossypium hirsutum
  Clone ID: LIB3197-046-Q1-M1-E10
ctcggttggctctttcttttttgtttctgtttcctctctttttattgaaaaattagggtttccgtcagcggtattgagaatcaatggcgtcgacttcgaggaagataatgttgaggagctccgacggagagacttttgaggtggaggaagcggtggcggttgagtcgcagacgatcaagcacatgatcgaggacgattgcgccgacaacgagatccctctcccaaacgtcaccagcaagatcttgtccaaagtccttgagtactgcaagaagcatgtcgatgctgctgccgacaaggaaaagactcccgatgacgaactcaaggcttgggatgctgattttgtcaaggttgaccaaaataccctctttgacctcatcctggcagcgaactatctgaatatcaagagc

SEQ ID NO: 51882 - DNA, 420 bp, Gossypium hirsutum
  Clone ID: LIB3197-046-Q1-M1-E11
agcaattgaaaatgtttgatgatttagctaagaacttctcagatcttacgtcaaaaccgagtttgtttgaaacagatgggaatttagatgaggatgttttaaggcagtttgagaaagaagtgaaagatagagtgaaatttgctaggttgatggtagctgaatctaaagagaattatgataatcagttgaaaattcagaagttgaaagataccattttctctgttagtgaatcattaggtaaggcaaaaaagaatggagctttagcgagctctattgctgctaaatctattcctaagagtttgcattgcttggcaatgaggcttgtggaggagagaatttcacacccggagaagtataaggaagagtcgcctacggctgagtttgaggatcctaatttgtatcattatgctgtattttcag

SEQ ID NO: 51883 - DNA, 460 bp, Gossypium hirsutum
  unsure (1)..(460): unsure at all n locations; Clone ID: LIB3197-046-Q1-M1-E12
aaataagaagaagatggagacaactcgtgatcagttagcagaggcactgtaccaaaaaggacttgcactggctgagattgaatctataaagggtgagaaaccttcagccttggctgcaagtgaagctgtcagctctgatctccggtcagacttatttgaggaaaactttaaagaactgacaaaatgggtagatgtgaagtcctctaaatatggcaccctctatgtactgcgggagaggcgatttgggaggcttggaactgcactgaaggtactaaatgacatgattcaggatgatggagagccaccaaagaagaaattctacgaaatgaagctgtcattgctggatgagattggatggaatcatttatcaacgtatgaaagacaatggatgcatgtgcggttcccaccaagcttgcccctgttctaaggtagntaaatttatgagacccaatttcaattt

SEQ ID NO: 51884 - DNA, 385 bp, Gossypium hirsutum
  unsure (1)..(385): unsure at all n locations; Clone ID: LIB3197-046-Q1-M1-E2
gtaaagcagatattgaacgcctctggaggtagtggtgcanaagggttgagcgaagatcacaaggaagagcaatggaaccctgcagacaagtgcttggctaacaatgtggggtctggtcttacatccgagattaatcgcaagaaactacagaacatcgagcatttggttcaaaaactgagaagacttaactccggacatgatgaagccagtacggattacattgcatccctttgtgggaatacaaatcctgatcacagatacgtttctgaggtattattagcctcaggccttctactgaaagatcttggttctggcttgacaaccacttcagctccatccatcaggccatcccatcaacccggagctgttttttggtttggagcaa

SEQ ID NO: 51885 - DNA, 121 bp, Gossypium hirsutum
  Clone ID: LIB3197-046-Q1-M1-E3
aaagctggtccgggggggtgcccggccgggatttccggggcggaccaacccgttcggtccacgcgtccgtccgaataattatgaggtcgcgggcgtcctcggataacccgtggcgccagcc

SEQ ID NO: 51886 - DNA, 392 bp, Gossypium hirsutum
  Clone ID: LIB3197-046-Q1-M1-E5
attctcattctctctccactgaactcttgctaaacggtatcgttttagtcagtctttcatcaatggcgaaagaaccagttcgcgtcctcgttactggagctgcaggacaaatcgggtatgctcttgtacccatgattgctaggggagtcatgttgggtgctgaccagcccgtgatccttcacatgcttgatatcccacctgctgcggaggctttgaatggtgtcaaaatggagttggtggatgctgcatttcctcttctaaagggtgttgttgctacaactgatgctgttgaggcatgcactggagtcaatgttgctgtcatgggtggtggtttcccaaggaaggaaggaatggagaggaaagatgttatgtcaaaaaatgtgtctatttac

SEQ ID NO: 51887 - DNA, 426 bp, Gossypium hirsutum
  Clone ID: LIB3197-046-Q1-M1-E6
gcctttccagaattccacacaaatatggcactggtgttcatcttgccacagtagaatttactaataccagtgcaaactattgtgatgttgacgaaaatggaataaagtacatgatactatgtcgtgtaataatgggaaaaatggagcttcttcgtcctggaagtggacagtgttatcctagcaatgaagattttgatagtggagtggatgatcttcagcatccaaagtactatattatctggaacatgaatatcagcactcacatttatccagagtttgttgttagtttcaagatctccaatgctgaagggcatttgattggaagtgagactaatcatgctgtttcaggcgtcactgcatctactccaggacttcaaggtcgtttaccagtattatcatcttgcggtgaattggggagtattaatc

SEQ ID NO: 51888 - DNA, 361 bp, Gossypium hirsutum
  Clone ID: LIB3197-046-Q1-M1-E7
cttatgatggctgtcggccatgacaccgctaaacggaaggggaagaagaaaaaggattctcctaaagatttggctagggaatctcggatcccaccagcagtcttgttccttcaatgctatatatgtcttgctgaaggacttacaatgatgcttgctgctttgaggaatgaaatcccagtcttccacggtccaagcccttttaatactgagcacgagaaatttgttcagcattttgagcttttacaaagagcctgcattcctgatcatgtttcgtacctgtcatacaaagaatcaacaactcatgctcgcttttctacgctagctatgtataattacttcaaggatgctcaaaggatcgcaa

SEQ ID NO: 51889 - DNA, 335 bp, Gossypium hirsutum
  Clone ID: LIB3197-046-Q1-M1-E8
cggacgcgtgggctctctctgttttttttttctctctattttctctctttagaacaatcccttcatccaaaaacccaatacaactgttaacaaaccctagaaagaggaagataaagtttcttccaacgattaaagagagaaaatagaggggaaatccaggcacatgcacctagtagaggcaacttcgatcaactaggaaatacagacgatttgtatttgaagaaacgatcaaggatgcgtcgttggctttgctgttcctgtcaagcagaggagaattaccaagcacatgaaaatgagcacttgaaagcccccaaggatcatacagatggaaatca

SEQ ID NO: 51890 - DNA, 413 bp, Gossypium hirsutum
  unsure (1)..(413): unsure at all n locations; Clone ID: LIB3197-046-Q1-M1-F10
gtggaagctactacgcatggtgccccaatgaactccctatgttgcgtcaaggcaacattggtgcagccaagttggcccttgagaagaatggctttgccctccctcgttactctgattcttccaaggttgcttacgtccttcaaggggctggtgttgctgggattattctccctgaatcagaggagaaagtgattgcaatcaagaagggtgatgcaattgctcttccatttggtgtcatcacctggtggtccaacaaggaggacactgaattggtggtccttttcatgggggatacctcaaaaggccacaaaccaggccagttcactgatttcttcttgacaggcgccaacggcatctttactggcttcacaaccgattntgtgaagagggcatgggatgtggatgatgacact

SEQ ID NO: 51891 - DNA, 442 bp, Gossypium hirsutum
  Clone ID: LIB3197-046-Q1-M1-F11
caacgacatcgtttcggagcagtagatccgaaatggaagcctcacagtcgcaggcatcagcgaacgcagccctgaaccctcaccctaaccctaacagcaattacacaaacaatagcaattctatactgtcatcgacgccggtgtggcccacaatcgacggtccgttgggcctgtcggaggaagaatcgttagcctacgctcggaggttctacaagttcggctacgcgcttctgccttttctttgggccatcaattgcttctacttctggcctgttctccgtcactctcgctccttccctcgccttcgcccctatgttgtgttatcagcaattgggttttcagtgttttcagttattttgtcttcatgggcattgacatttgccataggagggagaacatctcttggttctaccctggatcaactggtaatataaaacgttgc

SEQ ID NO: 51892 - DNA, 429 bp, Gossypium hirsutum
  Clone ID: LIB3197-046-Q1-M1-F12
cagcaatcagtatgtgtcttgctctgacttttattattcttgaagtacctatgtttgacattcgtatttgcacattttcagacatgtatataggaatatgactcctaatcagtactcacacctaaagtccgagtagcataggatttgttttctgtccatcattacattcaataattatatgatggagtgccatgatttggcagcctccatatacacatgcaaataggcagaagcttcagcaaagaattatccaagagaaactcaaacttccaccatttcttactacagaagctcactctttactgaaagggttgctgcagaaggagccaccaagaaggttaggtagtggtcctggtggaggggatgagataaagaaacataaatggtttcggtcaatcaattggaagaaattagaagctagagaaattc

SEQ ID NO: 51893 - DNA, 194 bp, Gossypium hirsutum
  Clone ID: LIB3197-046-Q1-M1-F3
gaacaatctgatccctttttttacatgtatatgattatcccaagggatgacatatgtcggcgctactgcgattctactgttagcttcgatagaccaaaattgtcataatccgttaaacatgtacaccggagacatactgccggtaccttaatacgctaacaacttcttgcatctgggcaacaattatcattttt

SEQ ID NO: 51894 - DNA, 346 bp, Gossypium hirsutum
  Clone ID: LIB3197-046-Q1-M1-F4
gggagttgctgatttttatagctcctttatgggtggctgtaattgttggggttttagttggttgggcatggaacccgaagtgggcaaatataggcagggagatgttcatggattgttctggttctaagaattcggctcctgcagaatcttctgagtcttcttccagtggttttggttcccttccgagcttgaatttgatcaagtttcagttgtcgagtgctatctcttggatttcagatgatgggcctcaaaaagattctttctttttgtcacctactcttcattccaattgcagttcatcacagaacgagaaggaaaaactgggttttctgacagatgatgattt

SEQ ID NO: 51895 - DNA, 329 bp, Gossypium hirsutum
  Clone ID: LIB3197-046-Q1-M1-F5
ggaatcgattccgctacatgttatttttcagacaccaatctaattaagctctttaactttcctctgttctttagtttactgtctctttcctttgttttgtctctaaacaaaatgtcgaacctatcttctataactgcaactgcagctcttcttctctcgctcatctctactgtcacttcccattactcttcctcctccttctcttcttccccaccggcgccacagtccaccgtctggcactccgcacgcgccacttactatgccgcatcggatcctcgcgacgccgtcggcggtgcttgtgggtatggagacctagtcaaggctgggta

SEQ ID NO: 51896 - DNA, 386 bp, Gossypium hirsutum
  Clone ID: LIB3197-046-Q1-M1-F6
cggacgcgtgggcgaagttctaccgccatggggagaagacctgcaaggtgttatcgtcagataaaaaacaaaccttacccgaagtcacgttattgtcgtggtgttcctgatcccaagattaggatttatgatgtgggaatgaaaaagaagggtgtggatgagttccctttctgtgttcacttggtctcttgggagaaggaaaatgtctctagtgaagctctggaagctgctcgtattgcttgcaacaagtatatggctaagtatgctggaaaggatgccttccacttgcgagtccgtgttcacccattccatgtcttgcgtatcaacaaaatgctttcatgtgctggagctgataggctccaaactggtatgcgaggtgcttttgg

SEQ ID NO: 51897 - DNA, 268 bp, Gossypium hirsutum
  unsure (1)..(268): unsure at all n locations; Clone ID: LIB3197-046-Q1-M1-F7
gaggacttggtcttggttgcgtgtatcactgcatagcaatggaagaaataagccgtgcttcggggtcggttggtctttcctatggtgctcattctaatctgtgcatcaatcagttggtgaggaatggaaaccctgcccagaaagagaaatacttaccaaagctcatcantggagagcatgtatgagcccttgctatgagtgaacccaatgctggctctgatgttgttagcatgaaatgcaaagctgatcgggttgatggggggttatc

SEQ ID NO: 51898 - DNA, 333 bp, Gossypium hirsutum
  Clone ID: LIB3197-046-Q1-M1-F8
tcggaggctctaagaaatttgagggctcatcggagtttatccatatgagatatcatatgggtccagtccttactgctaatatcaccatccacccaatctggtacggccggtggcagaaatcccagaagaaaatcatccgtgagttcatcaactcgatctccgccgttgattccaaacacccttcggtggctgggtggtggaagaccgtacagctttacaccgaccaaacgggagccaacatttcccgtacggtgctattaggtgaagagaaaaacgatcgtttttactcccacgggaaatccctcacgcgcttatcgataccagtccgttatc

SEQ ID NO: 51899 - DNA, 187 bp, Gossypium hirsutum
  Clone ID: LIB3197-046-Q1-M1-F9
gctttcactgacagtgagaggctgattggtgaggctgcaaagaaccaggcagctgttaacgcagagagaaccatctttgatgttaagagactcattggaagaaagtttgatgataaggaggtccagaaggacatgaaacttgttccctacaagattgtgaacagggatggaaagccttatattcaag

SEQ ID NO: 51900 - DNA, 360 bp, Gossypium hirsutum
  Clone ID: LIB3197-046-Q1-M1-G1
gattctacttacattaaaaggctaattggtgaggctgcaattaaccaggcagttgtcaacgcaaacagaaccatctgtgatgttaagagactcattggcagaaagtctgatgatacagttgtccatgttgacattaaacttgttccctacattattgttaacagttatatgtagccttatattcaagtgaagattaaagatgaggagacctaggtttttagtcctgaagagataatttctatggctctaatgaagaccaactaaacagatgtagcttaactcgtgacgaaattaaatgatgcagtactgactatgtctgcttacttcaatgtttctcatagacaagcctcctttgatgct

SEQ ID NO: 51901 - DNA, 436 bp, Gossypium hirsutum
  Clone ID: LIB3197-046-Q1-M1-G10
ggtaatagcgttgatgtcagaaatcatgagatgaggcttcatgagattaatacacttgaatgggatgagcttctggtgacatatgatagcaatgactcatctatatctataagagacaataattcttggtttcatcaactgaaccaaacaacaggaaatggcttcttaaattatggtggccctatcttagctgataatttatcaacggaaatctgtatgcttggtaatctagttgagccagctgctcagagtaataatacttacttcaacagcccaacgactgtctgtaatacgatatctagtacccaaatgaatcctaatgtgcaacagaaagactctattgccacacgggccggtgatgcattggacctgtcgatcaatgatggctgaaatagtcagggcagtttttgaaacggggtgaactacactatcactg

SEQ ID NO: 51902 - DNA, 348 bp, Gossypium hirsutum
  Clone ID: LIB3197-046-Q1-M1-G11
ggtgggttcatcaggaattttaaactgataaaattctacccacattgtgtgtttaatccaaaatggggtcctcttattagttttagaaagttgaaggaaatcccatttttgcagtatagaaacagatttggttttcactctcttgaaatttgatttttagtgtctttctgattactgtgaatacatggagaaatcaatgtcaatggctcctctgcttttaatggtactctgtcttccttttgcattgggttggcatgactataaccaagctctcagtaagagcattctcttctttgaagctcagagatctggttatcttcctcataaccagagagtcacatggcgagc

SEQ ID NO: 51903 - DNA, 374 bp, Gossypium hirsutum
  Clone ID: LIB3197-046-Q1-M1-G2
ggaaaaaccagaaaaatggcgaaaccccaacttttatttctattttccttttcccttctctgtctcatttctttttccgccgccgattcctccatcacagccgacttacgtctcaccgattccagtttcccgtcggttcatgcgaagaagctgattagggagttgaatttgtttcctaaaggggaagtcaatgtcgttgacgaacaccgggtttcgttgccggagggtcccaaactggtggagaagcggttcaagttcccaactttggaagtgcccggtggagtttcctttgaggatttgggtcaccatgctgggtattacaagcttcctaattctcatgatgccagaatgttctacttcttcttcgaatcacg

SEQ ID NO: 51904 - DNA, 201 bp, Gossypium hirsutum
  unsure (1)..(201): unsure at all n locations; Clone ID: LIB3197-046-Q1-M1-G3
ttttagtattttaagttgtaaaaattcaatctttgaattcagtttggtgtggtctgtagttgttggtattgttatcgaggagctatcattgaaacctctcactcttcgtaaatttgaaggctccccaatttaattnttatattatttattctgggaaatttgtttggtgggacaaaatttcgggttgtagaaccatttttt

SEQ ID NO: 51905 - DNA, 367 bp, Gossypium hirsutum
  Clone ID: LIB3197-046-Q1-M1-G4
atctctgaaggtgtcttaataaacgccttcgatttaccttcgatttccatttacttctctattgctacgtttttgaatttttagtgagcgaaaatgagagagtgcatttcagtccacatcggtcaggctggtattcaagtcggaaatgcctgctgggaactttactgccttgaacatggaatccagcctgatggccagatgccaagtgacaagactgtcggaggaggtgatgatgcttttaacacctttttcagtgaaactggtgctggaaagcacgtccctcgtgctgtctttgtggatcttgagcctactgttattgatgaagtgaggactggtacttaccgtcagcttttccaccctgagcaac

SEQ ID NO: 51906 - DNA, 380 bp, Gossypium hirsutum
  Clone ID: LIB3197-046-Q1-M1-G5
gtcttggcagctccttatccggaaccagagaccgcagggagctcaagcagccatgggagcttacaagtacgtgtcagagctatggaggaagaagcaatccgatgttatgaggttcttgcagagagtgaggtgttgggagtaccgccaacacccgtccattgtgcgagttaaccacccaactcgtcctgacaaggctcgtcgcttgggatacaaagccaagcagggttatgttgtctatcgtgtccgtgtgagacggggtggaaggaagagaccagtacctaagggtattgtgtatgggaaacccacaaaccaaggtgtcactcagcttaaatttcagcgcagcaagcgatcagttgcaaaggagcgagctggtcgaaagc

SEQ ID NO: 51907 - DNA, 368 bp, Gossypium hirsutum
  Clone ID: LIB3197-046-Q1-M1-G6
cggacgcgtgggcgattttctgtccgattggataaggtgaatgtgccggattctgttcctccggttgtgacggtggcacaggaagttgttgcgaaggatgtaacggcgggatcagactgtggatcggaggaccagcatttgatcacggacccaatggtatctccagcagagatccagaggcaaatccatgaattacagaggatgcatattgctgctacacaagaacaaggcattttgcagagaaaaatcgatgaatcaaatgctagagcttacaatactcaagattattcaaaaatgttggataaaattgccacttcaccggcaccagtatcaactccgctgcaaatgccaattcaaaacgggtattt

SEQ ID NO: 51908 - DNA, 363 bp, Gossypium hirsutum
  Clone ID: LIB3197-046-Q1-M1-G7
tacactatctccctcaaatttggaactccgcctcaaacccttcctttcgtcatggacaccgggagcagcctctcctggttcccttgcacctctcgttacctttgttcccaatgcgcattccccaatgttgaccctgcaaaaatccccacttttgcccctaaactttcatcttccagtaagctcgtaggttgtagaaaccccaagtgtagttggctttttggccccgacgttgagtctcgttgccaagactgtgaacccacttccgaaaactgcactcaaacctgccctccttacataattcaatacggtttaggttccactgctgggcttctattagtagaaaaccttgctttcccccaaaaa

SEQ ID NO: 51909 - DNA, 372 bp, Gossypium hirsutum
  Clone ID: LIB3197-046-Q1-M1-G8
ctcactcccactctcactctatttttctctagtaattgctgcaatcggatttgttgaaagatggctgagggttcagctgcagttcccagcactgagttgttggaatggccgaagaaagataagcgtcggttccttcacgccgtgtaccgtgttggcgatcttgatcgtaccatcaagttctacactgagtgttttgggatgaaattgttgaggaaaagagatattcctgaagagaaatactccaatgcctttcttgggtttggcccagaggagtctcaatttcgtgttgagttaacttacaattatggagtattatcgtatgatattggaaactggtttttgggcattttgcaattgcaacaacctgatgtc

SEQ ID NO: 51910 - DNA, 374 bp, Gossypium hirsutum
  Clone ID: LIB3197-046-Q1-M1-G9
ggaaaaagccacgtcaagccgggtaagttgatgggaagaaaagagtgtccgtcggtcacatttgatctcccctacctggctttctattataaccagaagctgctgttttacaagaacgacggtggtggtgagttcgaggacaaggttgaaaagctcaaggaagggctgagggtggtgttagaggagttttatcagctaggaggtaagctcgggaaagatgacgatggggttcttagagttgattatgacgatgatatggatggtggttgagtggtggaagccgtggcagaggggattaccgtcgatgaattgaccggtgatgatggtacgagctcatttaaggaattgataccctttaatggcgtcttgaactt

SEQ ID NO: 51911 - DNA, 69 bp, Gossypium hirsutum
  Clone ID: LIB3197-046-Q1-M1-H1
atcttgggttagcctatcttcaattaatttccttttaataaacggattctttatcgggttctaaaaggg

SEQ ID NO: 51912 - DNA, 362 bp, Gossypium hirsutum
  Clone ID: LIB3197-046-Q1-M1-H10
cccacgcgtccggggaaagatcgattcatcagtcttcttctctgagtagaggttttggatttgtaagcatttacaatgtcttcgtcctatctcccagcaaccactgactcaattgctctggccttagaagccaaaacaccatctgaagccatctcaatcctttaccgtgtactagaaaatcctgcatctgctcccgatgctctacggattaaagagcaggccataacaaatctatctgatcttcttagacaagagaaccgagcagaggagctcagaagccttctgacccaactgaggcccttttttgcactaattccaaaggcaaaaactgctaaaattgtcccgggtataattggtgatgt

SEQ ID NO: 51913 - DNA, 454 bp, Gossypium hirsutum
  Clone ID: LIB3197-046-Q1-M1-H11
ttccacttgaagcttttgtggcagcaggttagctgtgtgttgcagctcttcaccaaactccaaaagtcttacatctaaacaaacaattcaaacacaacaacaacagtcagactgttagggttgtatgccctgaatttctctctttatttaactgttatgtcctgtttcagttattctgcatgttgattcaaatttatagaatcttttccgagaaaaagtgaaaaacagctatactctcatctatcatatattatttgtgaacttcttttaatttcactttctcatgctttgagtttgtgtttactgcaggccaagaggcggagggggagaactcctactccaggaagatatttggggttgagaacttctcgtgctcgtcatcgatctcgaagcaactcaccttgtcgatcttcaaggtattcctcttattcaagaagtcagagtcggtcttctc

SEQ ID NO: 51914 - DNA, 345 bp, Gossypium hirsutum
  unsure (1)..(345): unsure at all n locations; Clone ID: LIB3197-046-Q1-M1-H12
aggtgtcttaataaacgccttctttcttcttcttctccctttctttgctttttcgaatttttcttaagcgagaatgagagagtgcatttcgattcacatcggtcaggccggtatccaggtcggaaacgcctgctgggagctttactgcctcgagcatggaatccagcctgatggtcagatgccaagtgacaaaactgtcggcaggtgatgatgcttttaacacctttttcagtgaaactggtgctgggaagcacgtccctcgtgccgtcttttgggatcttgaacccactgttattgatgaagtgagaactggtgcttaccgncagctctttcacccagaacaac

SEQ ID NO: 51915 - DNA, 404 bp, Gossypium hirsutum
  Clone ID: LIB3197-046-Q1-M1-H2
attccctgtacgagggtatcgacttctactcaaccattacccgtgccagatttgaggaacttaacatggatctattcagaaaatgtatggaaccagttgagaagtgtttgagggatgccaagatggacaaaagcagcgtccacgatgtcgtgcttgttggtggttctactagaattcccaaggttcagcaacttttgcaagatttcttcaacgggaaggagctctgcaagagcatcaacccagatgaagctgttgcttatggtgctgcagttcaagccgctatcttgagtggcgagggaaatgagaaggtgcaggatctgttgctcttggatgtcacccgctgtctctcggtttggaaaccgcttgcggtgtgatgactgttttgattccgaggaacaccacca

SEQ ID NO: 51916 - DNA, 309 bp, Gossypium hirsutum
  Clone ID: LIB3197-046-Q1-M1-H3
caaataccagccaaacatcgtcgtcttctacactcttctctggtgagttcatcgaaagatcaaatcaagatccctgccaaaatgaacgacgctgatgtatccaagcagatccagcagatggtgagattcatccgccaggaagcggaggaaaaggctaacgagatctctgtttccgctgaagaggagttcaacatcgagaagcttcaattggtggaagcggagaagaagaagattatgcaggagtacgagaagaatgagaaacaagttgaaatccgaaagaaaaatgagtattcgatgcagcttaatgca

SEQ ID NO: 51917 - DNA, 369 bp, Gossypium hirsutum
  Clone ID: LIB3197-046-Q1-M1-H4
cccacgcgtccgtttcttttcatctcaaaaattgaaatttcaccgtcaaagctttttcccctcaggttcgagctctgaaatggcaaccgagaataacagttccagggtcggatctggatccggatctcatactgtcaacggcgacgcggctcctgaccgcaagatcgcgttgatcactggcatcaccggtcaagatggttcctacctgaccgaattcctcctcaacaaaggctatgaagtccatggcttgatccgccgctcttccaacttcaatacgcagcgtatcaaccacatctacattgatccacataacgcccacaaggctcggatgaagctccattacgctgacctcaccgacgctttctcgct

SEQ ID NO: 51918 - DNA, 319 bp, Gossypium hirsutum
  Clone ID: LIB3197-046-Q1-M1-H5
gaagagaagaagctttacgtatggtttttctgaaattttgaatggtttttgaaagtaacaaagaagatgacgtcgacttcggtagcaacttcgtcttctaggatttgcttcaattcagtctgtaacgatttgaaatcggaaagaccgaggaaaggatggcggttgcgaacgggagagttggctgagctctgtgatcgatgcgcttctatttacgatgagggaagattttgcgatacttttcacttaatgagcttcttagacgagagaaccgaacacatgagctcagaagccttatggcccaagcgatgcccttttttgc

SEQ ID NO: 51919 - DNA, 354 bp, Gossypium hirsutum
  Clone ID: LIB3197-046-Q1-M1-H6
gaaggatgcctatgtaggagatgaagcacaatccaaaagaggtattcttactttgaaatatcccattgagcatgggatcgtcagcaactgggatgatatggaaaagatctggcatcatacattctacaatgagctccgtgttgctcctgaggagcaccctgttcttctcacggaagcacctctcaaccccaatgccaacagagaaaagatgactcagatcatgtttgagaccttcaatgtacctggcatgtatgttgccatccaagcaggtctttctttgtatgccagtgggtcgtacaacaagtattgtgctggatttctggtgatggtgtttcttcacactgggccaaatct

SEQ ID NO: 51920 - DNA, 431 bp, Gossypium hirsutum
  Clone ID: LIB3197-046-Q1-M1-H7
gcttctcatcaccaattgcgaaggaatcgattcacctggactcattttcctcgttcaagctctgctctctgacgctcgcttcactctccatgtctgcgctcctcaatcggacaaatcggttgccggtcattccctgacggtgcaagagacggttgcagtatgtttagttgaaatgagcagtgccactgcttttgaagtttcaggaactcctgtggactgtgtctccttagctctgtctggagcattgttttcatggtcaaagcctgttttggtgattagtggaattaacagaggatcaagctgtggtcgcaacatgttctactcaagagctgttgctgcaactagagaggcactaatttgtggtgtgccatcactttgtctatcattcgactggaagaaagatgttagcggtgaaagtgatttgaaaaatg

SEQ ID NO: 51921 - DNA, 396 bp, Gossypium hirsutum
  Clone ID: LIB3197-046-Q1-M1-H8
cacgattctgaaattttgcctgccgctccatctctacatcacaggaatggcgacagatgttgcagcccccgccaccgccgcacccaaagacccaacccaacctcaccttgaagtaaaactcttcaaccgctggagcttcgaggaagttcaggttgctgatatctccttgagtgattacattggtgtccaagcttcgaagcatgctacctatgtgccacacactgctgggaggtactcagttaagcgtttcaggaaggctcagtgcccaattgttgaaaggcttacaaactcacttatgatgcatggccgaaaccaatgggaagaagctaatggcagtcaggattgtgaagcatgccatggatattaattatctcttgactgatcagaacccaattc

SEQ ID NO: 51922 - DNA, 355 bp, Gossypium hirsutum
  Clone ID: LIB3197-046-Q1-M1-H9
ggaaaaagccacgtcaagccgggtaagttgataggaagaaaagagtgtccgttggtcacatttgatctcccctacctggctttctattataaccagaagctgctgttttacaagaacgacggtggtggtgagttcgaggacaaggttgaaaagctcaaggaagggctgagggtggtgttagaggagttttatcagctaggaggtaagctcgggaaagatgacgatggggttcttagagttgattatgacgatgatatggatggtggagaagtggtggaagccgtggcagaggggattaccgtcgatgaattgaccggtgatgatggtacgagctcatttaaagaattgataccct

SEQ ID NO: 51923 - DNA, 366 bp, Gossypium hirsutum
  Clone ID: LIB3197-047-Q1-M1-A1
ctgattggaaattcaccgggaaccttcctcccctatctgatgacgagtggcagcaagagtttgagaaatacaagcagtcaccagagtacaagcgagtaaacaaagggatgagtattgaagattttaaatttatatactggatggaatatgcccatcgaatgtgggggagagccctaggcatgatgtttgcattgccgttctcgtattttcttcgtaagggatatattaccatgcgccttggactaagactctctgctctatttgctcttggtgctggtcagggtttaattggttggtggatggttaaaagtggattagaggaaccagcttcggaatatgttgagccccgagtgagcccttatagac

SEQ ID NO: 51924 - DNA, 351 bp, Gossypium hirsutum
  Clone ID: LIB3197-047-Q1-M1-A10
ctggcattgctgcataagttcttaaatgcatgggaatcaatcttaaagatgcacgtgtataagtggagaagataattggaaggggaagtggatttgtcgctgtggagattccttttactcctcgcgcaaaacgtgttctggaactctcgttggaagaagctcgccagcttggccataattatattggatcagagcatcttcttcttgggttgcttcgtgaaggtgaatgtgtagcatcccgtgtttttgagaatttaagtgctgacccaagttatatccgctcccatgttatccgtatggatggtgagggcaataaactttagattgttactggaggatcaagtggaaaca

SEQ ID NO: 51925 - DNA, 390 bp, Gossypium hirsutum
  Clone ID: LIB3197-047-Q1-M1-A11
aaaaacacttgcagttttctgaatggggacgatagttcaaactaccgttgtcactgtttttctttgtcttctttttcctattgtcttttccacatccaatgacggattgttcagaattggactgaagaagagaaagtttgatcgcaacaatctgttagctgcccaacttgattccaaggaaggagaagcgttgagaggttcttttagaaagtatcttcatggcaacttacaggagtcaaaggatattgatatagtggcactaaagaactacatggatgctcagtactttggtgaaattggtattggcacgcctccacagaacttcactgtaatttttgacactgggagttctaatttgtgggtgccttcatctaagtgttatttctcaat

SEQ ID NO: 51926 - DNA, 455 bp, Gossypium hirsutum
  unsure (1)..(455): unsure at all n locations; Clone ID: LIB3197-047-Q1-M1-A12
ctctttctaaaaataaaacaaaatattaattaggatatatggcaggtgattcagggaagaaggaagagatgccaaaggtgaaaatcatcagcacaagtcatgtgaagcctggaaagatgataggaagaaaagaatgtcaattggttacttttgatctcccatatttggcattccattataaccagaagctgttgttttacaagtgtggggagtttgaggagaaggtggaaaaactcaaggatgggctgagagtggttttggaggagttttatcagctagcaggcaagcttggtaaagatgaggatggggttttcagggtggaatacgacgacgatatggacggtgtcgaggtggtggaagccaccgccatggagatcggcatcgaggaactggcggctgaagacggcactggctctttcaaggactngataccctacaatggtgttctgaacttg

SEQ ID NO: 51927 - DNA, 470 bp, Gossypium hirsutum
  Clone ID: LIB3197-047-Q1-M1-A2
cagaaaatgaaaaacatcaaagtcccagaatttagtttctatttttgtagtgttttgttgattttgttggtgaataatggatgttgtgactggggctcctccattcatgttggtcacgagataagccttgcggtgccattggaatatagtgatgggttcattgggagagctttcttgatggatgatggtaatggtcaggtggaaccaaattttagagttgcattgagtgctgaagctaacaaagggggatattcatgctccttggaagtttttttaggggatgcgtgcttgagcttactgaagatggggatttactgttgaagggtgccgaagatcaagtcggatggcggaccggcacttctggacaaggtgtggagagattaagaatcctgaagacaggtaatctcgtacttgtggatgttttcgaccaaataaaatggcagagtttcaatttcccaactgatgtaatg

SEQ ID NO: 51928 - DNA, 425 bp, Gossypium hirsutum
  Clone ID: LIB3197-047-Q1-M1-A3
aaaaagcttaagcgctgcaatggatgaaagtgggagaaagggcgagaatggaatagaattggaataaacaaaaaagtaaaagctaaaattaaaattaaaatgctaaaatgatgaatctatccacgatgatagcgtatggataccgccattgtacgccaccaataaagcaactcttaaactacactaccttccttcatcttcaccatcaccatcaccatcaccatcaccatcaccatcttcaaggccgccctctttcctttaacagtcttaatctccctaacctcaatctccttctcacgggtaattgtctcttcttcaggatgcagcgcttttggatcggaaatgggatcaacaaaaacaaacaaatgggtggagcatttgcagcgttacagagtgatttcgtcaatgaaagtagctgaagtaat

SEQ ID NO: 51929 - DNA, 478 bp, Gossypium hirsutum
  unsure (1)..(478): unsure at all n locations; Clone ID: LIB3197-047-Q1-M1-A4
agaaaatggaaggttcatcttcatcttcacgccacgtactggcaatccttctcattatccttcaattcacgccctccatagccaaaaccttctcccacaaaccataccacaccaaaagaaacaccgaatacatcagatcttcatgcaccaccactacctaccccagattatgttaccgctccctctccatctacgcctccaaaatcaacaccagcccccgactgattgcccacaccgccctgctcgtcaccttcagagccagcaaatccacgtccaggttcatgcgaaaaatcgccagaacccatcgtttgaaacctcaggtcgctgccgccatggcggatngcatcgaaatgatcgacgactctatcgacgagnctcaaaatctataggtgaaatngctcgtatcagacgctccaactttgtgcttattatgagtgatcttcaaacctgggttagtgctgcactgacagatgaagat

SEQ ID NO: 51930 - DNA, 476 bp, Gossypium hirsutum
  Clone ID: LIB3197-047-Q1-M1-A5
tttgaagtacctaagccttagggactgaaaatgaaaggtaagaagaaatatttaaaatatatgtttggtagtaaggacacatagaagaacaaaactgggtgagtgttaatgccaattgcatgagattctaaaacgtgaaaacttcaataaatccaaatctcaggtcaagtctgcatcacagaaacgtagttgttgagagtagattaagttattgaaaatatcgttaaaatattcaatatttatttaggcagcctccgtagttgaaatttcagtattttattattcgtattgtttgcttaattggctgtgctctcgcttgttcagaatcaatcctgctatttttatactagtagttcgaatttgcgggtgccgagacatacaatcaatttactacctctatcatcgcaaattctgaaagataagggatccgatctgatctgctgcaaatgggggagaatgggcgttgataaaacggg

SEQ ID NO: 51931 - DNA, 456 bp, Gossypium hirsutum
  Clone ID: LIB3197-047-Q1-M1-A6
gtttctctttgaattcccaaatgggtttgtgggaagcttttctcaattggctgcgaagcctgtttttcaagcaggaaatggagctatctttgatcggacttcagaacgcgggaaaaacctcactagtaaatgttgttgcaactggtggatatagcgaagatatgatccctacggtcggattcaacatgaggaaagtgacaaaaggatatgttacgataaagttatgggatctcggaggtcaacctatgtttcgtatcatgtgggaacgatactgccgtgcggtttcggctatagtttacgtggtggatgccgctgatcccgattacttgaacatcttaagatgagagctttatgatttgttgagtaaaccctctcttattggtatccctcttctgctgttaggcacataatcgacaagccagaagcttgtcaaaacatgctttaacttaagatttg

SEQ ID NO: 51932 - DNA, 223 bp, Gossypium hirsutum
  Clone ID: LIB3197-047-Q1-M1-A8
ctcggaccaatgagtccgacaagtgtgggagggagcgctctaataagcgggaaaggctcattgaagctgattggcggcatccctcgggggtgcaccgacgaccgaccttgattttcagagaagggttcgagtgagagcatgcctgtaagaacccgtaagatggggaactatgcctaatcggggcttactcagaggaaactcttgtggaggcccgcagcgatac

SEQ ID NO: 51933 - DNA, 347 bp, Gossypium hirsutum
  Clone ID: LIB3197-047-Q1-M1-A9
gccacacgtgctgcttggtactgtggggcctacagtaccaaatgcggatgtacgcctagaatctgatgctgaaatgggatatgatgcccttgcacgcacaccacgaggtgaaattggtctcaagggatcaacattgttctcaggggactccaaacgtgaatacctgaccatggaggtcatgattgaagggtgggttcacacaggcgatatcggcgagaggcgaccatatggagagatgaaagtcaatgatcgaaagaagaacatctttaagctgtcacaaagagaatatgttgctggcgacaacctgtacaatgtttatgggtgagattctgaccttgaatcgacat

SEQ ID NO: 51934 - DNA, 385 bp, Gossypium hirsutum
  Clone ID: LIB3197-047-Q1-M1-B1
cttcaataatttcttccgtcgatctttgttagagattagctctgtaatttttcattatgggaaagatcaagatcgctatctatggatttggaaagatcgggcgtttggttgcaagagttgctctccaaagcgatgatattgagctcgttgctgttaacgatcctttcatcaccactgaatacatgacgtacatgttgaagtacgacagtgttcacggtcaatggaagcatcatgagcttaatgtgaaagactcaaagaccctcttctttcgcgaaaagcctgtcacacttttcggtatcagaaaccctgatgaaatcccatgggctgaggctggagctgagtatgttgctgagtctactggtgcttttactgacaaggacaaggc

SEQ ID NO: 51935 - DNA, 461 bp, Gossypium hirsutum
  Clone ID: LIB3197-047-Q1-M1-B10
cccacgcgtccgctgacatactggtcgattggtttgaaaagtgtaagaaagatccatctcactgggataagatctcccaaggaggcttgaaacgtatcgaggagaagtatacatggaagatttactcggagagactattgaccctgaccggagtgtatggattctggaagcatgtttccaaccttgaacgccgtgagagtcgtcgttaccttgagatgttttatgctcttaagtaccgcaagctggctgaatcagttccattggcagaggagtaaatttaagctgttaaataacattgggccggtttttcttggagaataatattctgttttgtaatttcaattggagaagctcttttgtatttcatcttggcttttccttttccttttttcgccggcattgtttgaacatggggtggtgcgcccggcaattccaattaaatatggggactttttgttttc

SEQ ID NO: 51936 - DNA, 105 bp, Gossypium hirsutum
  Clone ID: LIB3197-047-Q1-M1-B11
ccccgcgaggagagatgtcatgtttcccacattcgaggcttgtgggctattatattctcccgtatcaagtattaatgaaaataaaaattcccacctcaccttcct

SEQ ID NO: 51937 - DNA, 468 bp, Gossypium hirsutum
  Clone ID: LIB3197-047-Q1-M1-B12
ctctatttccccatctccctgtctcactacattgctctgattcttgttcacgtctagcttggcattttctgtttttctcaatggcaatggatgcttcactgactatgtgcaagtcggtcacatcacctcctggcttattcttggggagaagtagagttattaggagttcccagtgtacctttatggtgggaagcaggatcaactttcctcggcagaaagctcagtcaacccaagttagatgtaaatctagcaggtgtggaggagctcttggtgctaaatgccgtgctgagaaaattttggtggcaaatagaggagaaattgctgttcgtgtaatccgaacagctcatgagatgggaataccatgtgttgctgtctactctacaattgataaggatgcacttcatgtgaagctggctgatgaatcagtttgcataggcgaagcaccaagcagtcaatcgtatttattga

SEQ ID NO: 51938 - DNA, 356 bp, Gossypium hirsutum
  Clone ID: LIB3197-047-Q1-M1-B2
gcgactttcaactttgaagaggaagacttgttaaaggaaagaagctgtaaaagtgagatagagatgttgaggttcacgttatattattgggtgttaatagttattttaattccatctgcctcctttgtgattgtatcatcatcgaaagaacagctaagttcaaagcaatgtgaggatctgggtttcacgggtttagccctttgttctgattgcaacactttttctgagtatgtcaaggacaaagagttgatatctgactgcttgaaatgttgcacagaagactcagatgattctacaagtaagattacttattcaggtgcaatactggaagtttgcatgaggaaactagtattcta

SEQ ID NO: 51939 - DNA, 435 bp, Gossypium hirsutum
  unsure (1)..(435): unsure at all n locations; Clone ID: LIB3197-047-Q1-M1-B3
atcatcttcctttcagtagaatttaaggggaatttttttttgaaaataacttaaaagaagagtgaagttttcgaaggatatgaacggcagtattgcgagctatctgcgaatctttccaagaagtgtacggctgctgttgctcttactggagagcagaagaaacanaaactntctgatgtaagagctggagtggaagatgcagaagctctgattcgaaagatggacctcgaagcaagaagtttgcagccaaatgttaaggctgtacttcttgctaagttaagggaatataaatcagatctaaacaatctgaaaagtgaagttaaaagaatcgcatctgggaaatttgaatgcggctgctcgagacgagttgttagagtccggcatggctgatactctcacggcatcagctgatcaaagatcaagattaatgatgac

SEQ ID NO: 51940 - DNA, 412 bp, Gossypium hirsutum
  Clone ID: LIB3197-047-Q1-M1-B4
gtcaggcgggattacccgctgagtttaagcatatcaataagcggaggaaaagaaacttaccaggattcccctagtaacggcgagcgaaccgggaaaagcccagcttgagaatcggtcgccatcggcgttcgaattgtagtctggagaagcgtcctcagcgacggaccgggcccaagtcccctggaaaggggcgccggagagggtgagagccccgtcgtgcccggaccctgtcgcaccaagaggcgctgtctacgagtcgggttgtttgggaatgcagccctaatcgggcgggtatattccgtccaaggctaaatacgggcgagagaccgatagcgaacaagtaccgcgagggaaagatgaaaaggactttgaaaagagagtcaaagagtgcttgaaattgtcgggagggaag

SEQ ID NO: 51941 - DNA, 434 bp, Gossypium hirsutum
  Clone ID: LIB3197-047-Q1-M1-B6
ctcatgtgttggaattattgtttaccgtggacttgagtttggaatgtatgattgtttgaagcctgttgttttggttggtggattgcaggatagtttcttggcaagtttcttgctgggttggggcatcacattctgtgctatacttgcatagtagtaaagttattaggaagttccagtgtacctttatggtgggaagcaagatcaactttcctcgacagaaagctcagtcaacccaagttagatgtaaatctatcaggtgtggaggagctcttggtgctaaatgccgtgctgagaaaattttggtggcaaatagaggagaaattgctgttcgtgtaatccgaacagctcatgagatgggaataccatgtgttgctgtctactctacaattgataaggatgcacttcatgtgaaactggctgatgaatcagtttgc

SEQ ID NO: 51942 - DNA, 430 bp, Gossypium hirsutum
  unsure (1)..(430): unsure at all n locations; Clone ID: LIB3197-047-Q1-M1-B7
ctttactttatttgtcgtttactgtttcaatttttgatttttacacattcttctcccctcctatcctctgctcaatcgatctgttcacatcaactttgctatatcttctcatttttggatcaatttctcctttcgcgctttgaagttgatttcttgaagatgggagcggaaaagaacttcattgacatggaggagggaactctggagatcgggatggagtatagaactgtgtctggtgttgcgggaccattggtcattcttgacaaagttaagggtccaaagtatcaggagattgtcaatattcggttgggggatggaacaactcgacgtggtcaagtcctggaagttgatggggagaaagcagttgtgcangtctttgaaggaacatctggaatngacaacaaatacacaactgtgcaatttacagggg

SEQ ID NO: 51943 - DNA, 330 bp, Gossypium hirsutum
  Clone ID: LIB3197-047-Q1-M1-B8
gaaaaattctcttttcatcgatcgccaaaaagcaaccgcgaacccccgtcgatcgcaggagagagggaatcgggataaatggggaagaaaaggaagtcgatagcgacgagcctcgatgaggttgatcggactatgtacgcctccttttgcagcgccgctaactccttgtctcacctttatactcagaccatgaatcagcaaaaactcttcttccaagctggcaaacgccatgggcttggaaaaatctatcaatggatttggagaccacaagagggaggatcaagagttacaacaatggatatcctcagttaccttcagaatgaactggac

SEQ ID NO: 51944 - DNA, 447 bp, Gossypium hirsutum
  Clone ID: LIB3197-047-Q1-M1-B9
cggacgcgtggggtttacatttgctgaggctgagaagttgtgttttttttttggggggtatagagaaatagatcatggcaaaagtagatgaaccacagccacatccaccaaaggagcagctgcccaacatttcttactgcattacaagtccacctccatggcccgaggccatccttcttggtttccaacattatcttgtgatgcttggaacgacagtgatcattccaacttcacttgttccccagatgggaggtggaaatgaggagaaagcaaaggttatccagactctactctttgttgctggtttgaacacattattgcagtcactgtttgggtctagattgcctgctgtgatcggagggtcttatacctttgtcccaacaacaatctcaattattcttgctggtcggttcaatgacagttcagatcctattgagagatttaaaa

SEQ ID NO: 51945 - DNA, 344 bp, Gossypium hirsutum
  unsure (1)..(344): unsure at all n locations; Clone ID: LIB3197-047-Q1-M1-C1
gnnnttttttttttttttttttttttttttagggaggttttttttatttggtttgatttttttggngatttttntttttttttttttaaatttttagtaattattatatannnngttttgaaaaaaaccccaattttcccaaaaacccaaaaaaaaaaaaaattgttttttaaaaaaaaaaaaaaaaaatttctttatcccccaaaaattggaaatttttccaaaaccaattgggaaaaaattcttaaaaaaaaaaaccctggggtaaaaaaaaaaaaccccccccctctttttttaaaaaaaaaacccctttttttttgtgggggggtttttttcccaatatt

SEQ ID NO: 51946 - DNA, 452 bp, Gossypium hirsutum
  unsure (1)..(452): unsure at all n locations; Clone ID: LIB3197-047-Q1-M1-C11
cggacgcgtgggcttttaaattccgaatcatgctttaattccataaaggtaaagaaaaaaaattgaaaaaagaaaagattaccccttccttaaggaaataaaatcaaagaaaaaaaaaccaccttttttctgtactaaacagttaatgtccatagtcaaataatagtaatttgttctgttatttcctatgaaagagcaatgggaaatatttctaggttttgtcttttataggtatatatgtgtgtttctttctttttatggtgcaggatcttcaaactctgagagaagaaattcaatccaaaaaaagaaaaagaaccccataagatgaggattaatgggagttgggagttgattttttattgattntttcaagtgatattgttatatagtaaaaaaagatgaattcaaaaaatcaagtggagtcaactctcaaggaaatactcgaagtggtc

SEQ ID NO: 51947 - DNA, 480 bp, Gossypium hirsutum
  Clone ID: LIB3197-047-Q1-M1-C2
gttcggagaggcaaggaaaagtgtcaaagttggccaagggagagatcctaatgttgaatattgggtctatgtcgaccggtgctcgagtcatagctgtaaagaatgatttggcaaagctgcaactcacgtcccctgtttgcaccaccaagggagagaaaattgcacttagtcggcgtgttgaaaagcattggcgtctaatcggttggggccaaatccaagttggaacaaccattgaagtcccaccctgccctgtttaagaactgataaacaggtaaacagaaagcaaaaacatctataagaaaaaaaagagggcagaagaatcaaattttttgtgttgaaaatgtgggaaggtagacaatatcttggtactatttttgtgaggtggagaagataacattgtttgatagagaaattgattggttccttgctgaaaacatggagctttttctaggatatatgataacttgaatttttaattgg

SEQ ID NO: 51948 - DNA, 433 bp, Gossypium hirsutum
  unsure (1)..(433): unsure at all n locations; Clone ID: LIB3197-047-Q1-M1-C3
gatgaatatggttgcttgtggatggcggcataccatatcagtctctgatactggtagattatacactaacgggtggagcaagtttggtcaactaggacatggggactttgaggatcaccttgttccgcataaaggggaatctttagctgacagttttattaagcagatagcaggtggatggagacatacaatggcactcacatctgatggaaaactctatgggctgggatggaacaagtttggacaggtgggggttgatgacaacgctgatcattgctctccagtgctaggtaaatttcctcatgagcagaaagtagttcaggtttcatgcggctggaggcacacacttgcaattactgaagagaaaaatggcttctcttggggaaggggtacaaatggacagctcgggcatggagaatncacggaccggaat

SEQ ID NO: 51949 - DNA, 439 bp, Gossypium hirsutum
  Clone ID: LIB3197-047-Q1-M1-C4
aaaaaatcatattcccaaataatttaatttaatttgattttttttaagatccttactgttggagtaccctaaaggctttaatctacactgtttaattaattatctttcaaatcctttcaattttcctttacttaaattctcttaattcacggattcatgaagttttgatttgtcgcacgctttacgagagtatgatggattctgaagatgtcttgcctgttgaggggcttgaggttgcccttcaaaatggtgttaattaggaaacttcaggtgtctgaggacgacgatggttttcagatatgtgactgggatgtgagataactttgagacttgttgcagatgaaatggtgatatggatactaagaagatgagaagatgattgcttctgatacattgattatgatctaaggaaggagtaagatatgtaacatcaatctaa

SEQ ID NO: 51950 - DNA, 474 bp, Gossypium hirsutum
  Clone ID: LIB3197-047-Q1-M1-C5
aaaaggttaagagcaaaagacagggcagagtaggcgtaagctttgatcatcaatggcggagaaaagtttcaagtacgtgatccttggcggtggtgtagctgctggatatgcagcgagagagtttgccaagcagggagtgcagcctggtgagctagcaattatttccaaggaggcggtggctccatatgaacgacctgccctgagcaaagcatatctcttccctgagggagctgctagacttcctggtttccatgtctgtgttggaagtggcggagagagattgcttcctgagtggtacaaggaaaaaggaattgaattgatccttagcacagaaatagtgaaagcagatcttcctgccaatactctagtaagtgccgctggagaaacattcaagtatcaaatcttgatcattgcaactggttcaacggttataaaattgacagattttggagtgcaaggagctgatgctaaaaa

SEQ ID NO: 51951 - DNA, 377 bp, Gossypium hirsutum
  Clone ID: LIB3197-047-Q1-M1-C6
gggaaatgctgtgtcatcagagcagaaaccggccggaggatggaaagcaatgcctttcattttagggaatgaaacgtttgagagatttgcaacgattgggttgctgtcaaatttcatggtgtatttgatgaaaaagtttaacatggaccaagtttcagcttccaatgtactcaatatctggtctggtgtatctaacttcgcaccactcatcggggctttcatctctgatgcctacgtcggtagattcgccaccattgctgtcgcatccgtcgctttatttatgggaaatgctgacgataacttttactgcttgtttcccacatctccagcctcctaattgcccatctgagcaccatttacattgtcactgcattagt

SEQ ID NO: 51952 - DNA, 441 bp, Gossypium hirsutum
  Clone ID: LIB3197-047-Q1-M1-C7
cttgatacacgccctcatttattttatttttcaaacaaattttcccttcagttttcgtataatttcctaggaaaagaaaaatgagagagtgcatttcagttcacattggtcaggccggtattcaggtcggaaatgcttgctgggaactttactgtctcgagcatggcattcagcctgatggccaaatgccaagtgataagactgttggtggaggagacgatgctttcaacacctttttcagcgaaactggtgccgggaagcacgtccctcgcgccatctttgttgatctggagcctactgttatcgatgaagtgaggactggtacgtaccgccagttgttccaccctgagcaactcatcagtggcaaagaagatgctgccaacaatttcgctcgtggccattatacaattggcaaagagattgttgatctctgcttggatc

SEQ ID NO: 51953 - DNA, 333 bp, Gossypium hirsutum
  Clone ID: LIB3197-047-Q1-M1-C8
caaagacttcagccacccacgcagcccgtgtggcgatccaaacaatgggacgcgtccgtacgaagactgtgaagaaatcgtctcgtcaggtaatcgagaggtactactctcgcatgacgcttgatttccacaccaacaaaaaggttatcgaagaagtagctattatcccatccaagaggctccggaacaagattgctgggttctcaacccatttgatgaaacggatccagaatggtccggttcgtggcatttctctgaagcttcaggaagaagagcgtgagcgtcgtatggattttgtccccgatgtatcagctattgctgttgattcaatag

SEQ ID NO: 51954 - DNA, 419 bp, Gossypium hirsutum
  Clone ID: LIB3197-047-Q1-M1-C9
cggacgcgtgggctgagcaggaatgtggatgagggtcatctaagagaaatattcggtaatttcggtgaagttgtaaatgtggatcttgcaatggaccgtgctcttaatcttccaagaggatttggatatgttgaattcaagacaagagcagatgctgaaaaagctctactttacatggatggtgcccagattgatggcaatgtagtaagagcgaaattcacacttcctccacgaccaaaagcttctccgccaccatagccaattccttctgctactactaaaagagatgctcccaaatctgataatgtcaatgctgataccgagaaggatgggccaaaacgaccacgggaaccttctcctcaacggaagcccccaccttcaccacgaaagagatctcctgtgggccgaagaggtggatc

SEQ ID NO: 51955 - DNA, 343 bp, Gossypium hirsutum
  Clone ID: LIB3197-047-Q1-M1-D1
aagaaataacatgaacgacacgggaataaacgtgtgcctagggttttcaaaatgtgttgttttcttcagaaaaaatatgatatggtatcattacatttgcacctttaaaatcaattaactttcgtgttgcatttgggattatacgtgaaaaagaagaaaaatcaactccgaggctaccttgaccataggtcaaatcgtgaattttcattaagatatctcaaaaaatggagaaggaagtcggcaacgggtgttcttctcttgcttacaagcttttattctcatgccctttcggtctgtctcagccacagctgtccgcagttttcgatgaatcatacgatagaat

SEQ ID NO: 51956 - DNA, 456 bp, Gossypium hirsutum
  Clone ID: LIB3197-047-Q1-M1-D10
gcgttggtcacaacattcaatgttgagatagggattactggtgccattttgacaaagctagatggggattctcgaggtggtgcagccttgagtgttaaagaggtgtctgggaagccaatcaagcttgtaggacgtggagagcgcatggaggacctagagcctttctatccagaccgcatggctggacgtattttaggaatgggtgacgttctctcatttgttgagaaagcacaagaagtcatgcgccaagaagatgctgaagagttgcaaaagaagataatgagtgcgaagtttgatttcaatgatttcctaaagcagacccgtgctgttgcgcggatgggttccatgacccgtgttattggaatgatccctggaatggggaaggttacgccagcccaagttcgagaggcagagaagaatttaaagttaatggaggcaatgattgaagccatgaca

SEQ ID NO: 51957 - DNA, 471 bp, Gossypium hirsutum
  Clone ID: LIB3197-047-Q1-M1-D11
cttcaataatttcttccgttgatctttgttagagattagctttttaatttttcattatgggaaagatcaagatcggaatcaatggatttggaaggatcgggcgtttggttgcgagagttgctctccaaagcgatgatattgagctcgttgctgttaacgatcctttcatcaccactgaatacatgacgtacatgtttaagtacgacagtgttcacggtcaatggaagcatcatgagcttaaggtgaaggactcaaagacccttctctttggtgaaaagcctgtcacagttttcggtatcagaaaccctgaggaaatcccatgggctgaggctggagctgagtatgttgttgagtctactggtgtttttactgacaaggacaaggctgctgctcacttgaagggtggcgcgaagaaggttatcatttctgctcccagtaaggatgctcccatgtttgttgtgggtgtcaatg

SEQ ID NO: 51958 - DNA, 470 bp, Gossypium hirsutum
  Clone ID: LIB3197-047-Q1-M1-D12
cccacgcgtccgctctttccttgtttttcatcgccgcttggcggacttctccacgttctttctttccctatttatactgtttccctcactttctttccttccaaacactcttctttccttaatctaacatggccttaactacccaaacttgtttccttcaaaatccattccttccttcgccttctctttcccagccttctgcatttcctgctccggcggctcttccttctcgaaaactccgccccatttctgtccagtgctccctggcttccgccccctctgtggcggtgacggcgtccaaggagtgcaaggtgaaatcggtcaaggctaggcagatcattgacagcaggggtaatcccacggtcgaggttgatttgatcaccgacggtctttatcgatcagccgttcctagtggcgcatctaccgggatctatgaggcccttgagctcagagatggtgacaagagtgtc

SEQ ID NO: 51959 - DNA, 308 bp, Gossypium hirsutum
  Clone ID: LIB3197-047-Q1-M1-D2
cccacgcgtccgccattatttagtgatcaaattgtggttgtttggttgacttattttgagatctgattagtttttgaaattgggttttgaaaaatgaggaaacccacataagaatcatagttaaacactgagccaatcggtcaaaatctgatcaaattgattagtaatctctgtttctctgcttatgtgatgtcgggtcttatatttacagccattgctatcacttatcaaccaccagatccatggctggaatcagctccttctttaaccaagctcttcactcaaactgaaaatgccacttttaaaat

SEQ ID NO: 51960 - DNA, 364 bp, Gossypium hirsutum
  unsure (1)..(364): unsure at all n locations; Clone ID: LIB3197-047-Q1-M1-D3
cggacgcgtgggttctcgactcactcttcccacttgttcgaagtctttctactgctgcaaatccctgtcttcccctacttcaccttctcccctcaaatcccgatctagggtttcgccgccaattcttttttcgcatttcgatcgctcttttttcttaccttaaatggcgattgcagcccaagctccagatattctcggcgagcgtcaatctggtcaggatgttcgcactcaaaacgtgatggcgtgtcaagcagttgccaacattgttaaatcctcactcggcccggttggactcgacaagatgctngttgatgacattggtgatgtaacgattactaatgatggtgctacgatcctgaagatg

SEQ ID NO: 51961 - DNA, 354 bp, Gossypium hirsutum
  Clone ID: LIB3197-047-Q1-M1-D4
agatgatcaaaatgggttttattgttttggccttgatggtggtttccgccgcgacggtggttacggcggctgacgagagtgggttagcgaatgattgcaccaaagatttccaaagcgtgatgacttgcttaagctttgctcaaggaaaagcagcgtcgccgtcaaaggagtgctgtaattcagtggcggggattaaagagaataaacccaaatgtttgtgttatattttgcaacaaacacaaacctctggtgctcaaaatctaaaagctaaggtgttcaagaagataagctgtttcagttaccatcggcttgtcatttgaagaacgctaccgtcagtgattgcccaaagctttt

SEQ ID NO: 51962 - DNA, 457 bp, Gossypium hirsutum
  unsure (1)..(457): unsure at all n locations; Clone ID: LIB3197-047-Q1-M1-D5
aatttccttaggtggaaatactattgttcctgtaggatctgagcaattttcaactaatttagctgctcctgagtggcaaaagcatcatgctgcgttgattgcccttgcacagattgccgagggttgttccaaggttatggttaaaaatctggaacaagtggtttctatggttttgaactcctttaaccattctcatccccgtgtgaggtgggcagctattaatgcaatcgggcaattgtctaccgacttgggtcctgttttgcagaaccaatatcaccaaagagtattgcctgccttagcagcggctatggatgacttncataatcctagagtacatgcccatgctgcttcagctgtgctcaacttcagtgagaattgcacttcagaaatttaacaccttacttaaatgaattagtagcaaattggcttgactttacagaaggggaaacaatggtgc

SEQ ID NO: 51963 - DNA, 186 bp, Gossypium hirsutum
  Clone ID: LIB3197-047-Q1-M1-D6
ctactcaacaccagagcctttttctttctgaggggagagagatatcagggaaggtgatggctttcaaaaagcgtcaatttactatcgttgaaaggcttacctctctttacactattgtccgaccatttgtaaccggtgaaaagcacccaagccacttccttgtgattcatggcttacccagtgaca

SEQ ID NO: 51964 - DNA, 402 bp, Gossypium hirsutum
  Clone ID: LIB3197-047-Q1-M1-D8
gtgattaagaagaagtatggtcaagatgcaggcaatgtcggtgatgaaggtggctttgctcctaatatccaggagaacaaggaaggacttgaattgttgaatactgccattgctaaagctggttacactggcaaagttgttattggaatggatgttgctgcatctgaattttacggaacagataaaacttacgacctgaacttcaaagaagagaacaatgacggtaaacaaaagatctcaggagatgctttgaaagatttatacaagtcattcgtagccgagtatccgattgtgtcaattgaagatccatttgaccaagatgattgggagcactactccatactaaccaatgaaatcggagaaaaagttcagattggaggagatgatcttttggtcaccaac

SEQ ID NO: 51965 - DNA, 174 bp, Gossypium hirsutum
  unsure (1)..(174): unsure at all n locations; Clone ID: LIB3197-047-Q1-M1-D9
cggacgcgtggggtttgcttgaggctttaacagtgccggatattacttgattttatgaggaatgcccttcattatactgattgtggccattgctttttccaaatcaacttccttgtactcaaatgccccagtgaaacaaataaattgtaccattgacatactgtgcataacana

SEQ ID NO: 51966 - DNA, 451 bp, Gossypium hirsutum
  unsure (1)..(451): unsure at all n locations; Clone ID: LIB3197-047-Q1-M1-E1
ctttattttgataaaaataaaatgccgatttctcgaatcgcagtcgggtctccggccgaagccggccaagctgatgcactcaaggctgctttagccgagttcatttcagtgcttatttttgttttcgccggtgaaggctcgggcatggctttcaacaagttgaccgacgatggctcctcgacaccggcgggtttagtagctgcggcattggctcacgccttggcgttgtttgtggcggtttcgatcggagctaacatttccggcggacacgtaaaccccgccgtcacgttcggtgctttcgtgggtggccatattacattggtgaggagtattttgtattggatagctcagttgctaggatcttgtcgtgcttgcttgcttctcaagttctcaaccggtggaatgacaacatcggcattttccttatcatccggngtaggagcatggaacg

SEQ ID NO: 51967 - DNA, 229 bp, Gossypium hirsutum
  Clone ID: LIB3197-047-Q1-M1-E10
atcgaatcatttacttgccatgccttcttatgaggagcattcattgaaagaagttgttgctttctgcatattcctttcgcctccgcacatttcaccatgttccttgacacctatatgtattagatcgaaatcccatttccctttacttgcagttcttctcttgaccttcatacttgttccattcttttcaattaattcaacattccacaaaatccataaaagcccgaat

SEQ ID NO: 51968 - DNA, 371 bp, Gossypium hirsutum
  Clone ID: LIB3197-047-Q1-M1-E11
tcgatatggcctatgagaatacgagctaaaggggagactgattgaagacaaagcattgtaaaccactcaaactgaagagcacgttgtggaagctcaaaagataagtgaaaatgagatagctgaaaagcagattgtttgtgaggataaaactgttgtaaatccttcccaagcttcagttgcaaagatataaaccgtatcagtggtactagaggaatcaagtttagaattaccaaagtcagtatccagaaggtaccaaaggtccatataatcatatttccagggaattagagtccattgattacacagagatgacaatttcaccttgttaaaaatatgttccaatatatatggaggacaaagatgttaaattc

SEQ ID NO: 51969 - DNA, 439 bp, Gossypium hirsutum
  Clone ID: LIB3197-047-Q1-M1-E12
ctggaggaggcacttatgaagtcatggtgacaaggccacggttggatttgtatatgaaccttccggcccttaagaagcttgatgcaattttgattaccatgcttgatggttttagtgagacagagttttggtatgttgatcggggtatagttgtgggtgatggtggtgcttattcatcgtctgtttctggagggagaccctcaattaggcaggaagagaagtggtggttgccgtgtccgaaagttccaccgaatggtttgtctgaagatgcaaggaagaagctgcaacaatgtagggatagcacaaaccaagtactaaaggctgccatggcgatcaataacagcgtgctcgctgaaatggagattcctactgcttacttggagacattaccaaagaatggaaaagattgtttgggtgatatcatttaccgctacattac

SEQ ID NO: 51970 - DNA, 451 bp, Gossypium hirsutum
  unsure (1)..(451): unsure at all n locations; Clone ID: LIB3197-047-Q1-M1-E2
cccacgcgtccgcggacgcgtggggaaaggttttcttcaatggccgaccggtgctgacgtaccagaggcgcttccctcctcattcctctcatctnctttcacccgatccgggtttgttttcgataaatttcttctatttccatggctgctccacctgcaagagctcgagctgattacgactacctcatcatagctcctttaatcggcgacagcggtgtgggtaagagttgcctccttttgcgtttctcagatggctcatttactactagttntatcacgacaattggaattgactttaagataaggactatagagctngatggaaaaaggatcaaactgcanatttgggatactgctgggcaagagcggtttcgaacaattaccaccgcttactatcgtggagccatgggtattctgctcgtgtatgatgtgactgatgagtcatctttca

SEQ ID NO: 51971 - DNA, 361 bp, Gossypium hirsutum
  Clone ID: LIB3197-047-Q1-M1-E3
cggacgcgtgggcttttgttgttgttgttgtcatggcttctctgcctttcatcttcttcttatctttctttataatctccacaacattgacgtcagccggcgccgccgccgccaccatcaaactctccctctctcccttccctcacccttcttcctcccatccttaccaaattctcaacaacttagtcacttcttctgttgcaagagcccaccacctcaaacatcccatagccaatgccgataatactacctcttctcttctcaggggctcccctatttctcacagttatggaggctacactatctccctcaaatttggaactccgcctcaaacccttcctttcgtcatggacaccgggag

SEQ ID NO: 51972 - DNA, 441 bp, Gossypium hirsutum
  unsure (1)..(441): unsure at all n locations; Clone ID: LIB3197-047-Q1-M1-E5
cggacgcgtgggaaaaaagacacccaaaaattctacttttgcgagagagaaatagcgaccctctggattccacctcctcccgtccttggcgacggtgtttatgccgcttctttttcagcttacctgacttggatttagagggatttagtttccttttcaagacatggaacaagtgtgcttctggtcaaattgctaccttttccgagtgtttttcttccaagaagtactcgattggcggttccttgcccgtggagattttcttttggtttcctttgtcaattgcacttagttctcagtctccttttaacactcaacacaggagctggaatgctagttttttctgagataggtgttggatntttagcacatttccgcaatgaatngatgacaaaacatccagatgaggattttgggaaaatgcttttcaagtctgactctatc

SEQ ID NO: 51973 - DNA, 424 bp, Gossypium hirsutum
  Clone ID: LIB3197-047-Q1-M1-E6
cttaattaaaactctgcagctttcttcagcgcaaatccaggggctttttcagaccagttttccctattaccttcctctcttgtttggctgcttcctgtccttcgattcactttttttgtttctctgagtttttttttattgcaaaagacttggatttgttcttcaataatcacttcggggttgaatcaaagtctaacaaaatgccgtggtctttcgtcaactgcgtgcgcttagttgttttctttcttgtcatactgtaattttatttgtttctggtgaatttcgattgaatttgaaaggggatagggttccttcaactttcgttcgcaattggaaaattttgggttggaggtgtgagaatgtacatttcggtaaccataaagagatatcgagcaattaaagaagttgggaaaataaaatgagc

SEQ ID NO: 51974 - DNA, 373 bp, Gossypium hirsutum
  Clone ID: LIB3197-047-Q1-M1-E7
gagaaggaagcctcctggtcgaagaaacctaaaaagacaccgcttcttattaaaaaaataataagaaacaccttttcacctaacagtcaccgtcaaccaactgccagtctggtttgtctaagtaacaagtcgctccccgtcaatcgtgctgaccaaaacagaccaacggcctagatcacccccaatttctccaaactgctgtactcaatctttcttctcccctccatatattcccccttcatttccagcacttttctctctgccctaagaccaaatcaatcctcaaaatctctgcaaactgagatttatatacatatctgaactttaattttctgtaaaatcgaaaccagatggagatgatccagtacaaccg

SEQ ID NO: 51975 - DNA, 416 bp, Gossypium hirsutum
  Clone ID: LIB3197-047-Q1-M1-E8
gctaaaacactgtaaaaggagggggggcaaaagttggcgccaaaattttgcttcttaaggtgctttttaccgctatcgcaacgtcttctctctctccctcccacgttctgaaaatgcagcgccaaaaatcgatactctcgttatggcaaaaaccttcgccggcgagccaaaacggcgctgtcggtgaggtaaaaggtcaaggagcttctctgtttccttctaaacagaacctgaatggcgacgtttgtggctcctctttagaagtcacaggcactgatactccaccggagaaggtgcctcgtaaggttttaccggtaaacttcgcatcgaatgccgaggctaggggttcctcttctctggtttctagtatcatgcacaagtttgtgaaggctgacgacagagaaaatggaagtcag

SEQ ID NO: 51976 - DNA, 464 bp, Gossypium hirsutum
  Clone ID: LIB3197-047-Q1-M1-E9
tatactttagctcgagttggaagggccagagatatcatcacactatctagtcattatgtgagttgagaagattgtatatcatcatggtttaaggcatgtataggatagactataggtagaatgatatttcgactttgtatacattacagccatgcgaagatggcttgctcattttgtttagagaagccttataattgaactaatgtggtgaaatgttttagttataacttgatagtagttaatttgttattagatattcggttatgttttgatagtgagtcattttagaaatttataagagctcttatggaaaatcaatgatacatgtttgcattgttgataatttatgtctggtaagtatctttgaccttatataagttttttcagtcaagtaataccttataaccttattccggcaacggatacaagttaagagtgttacagaaaaataaaattatatttgc

SEQ ID NO: 51977 - DNA, 254 bp, Gossypium hirsutum
  Clone ID: LIB3197-047-Q1-M1-F1
atatcttataaagctgctgtaatttccggacaccggttcctgatggacatcaagttcagggaagagccttcatcccactttcaatctaaggtttgttaagctgttagtggtgaatatcttgatgtatgtattaagcaaaatgttgaaataaggtgtagcaatgagtgtaatttttaatgttcgatgatggacttaatttgaagttcttattttgtccaacaacatatttaagagttaaagtgatggagattaca

SEQ ID NO: 51978 - DNA, 428 bp, Gossypium hirsutum
  unsure (1)..(428): unsure at all n locations; Clone ID: LIB3197-047-Q1-M1-F2
actgcttctcacttgctttcttttcttttcttttgactggacttctcaaagcattccccaatttcctccctgtttccagctctagtttccaagcagtttcagaggaaagaaagtaaagcctgtttaccgaagatggaaaaccccatcacttcaaaatgctgcaaccatcagccctggtttgtcttacttgtctntntcgttttctgtattgagctnatttcctttgattactctggttttactgctaaaaaatctgccctcgtcactgttttggatgataatcatggaaacgtaatcaatacccaaagttctttacctcatgatttcactnngaataccaatgctagcgtctatccattgcccaaaactgatgaanagggagatttgaaagtgggaactgagatcgattcttgtgtggggagatatat

SEQ ID NO: 51979 - DNA, 383 bp, Gossypium hirsutum
  Clone ID: LIB3197-047-Q1-M1-F3
agaccgtctcgctgggaaagcatctggaggatcaagtgagaaatctgagtctagtgcatctgtagaattgaattcccacaactttgatgaatgggtgctcaaaagtaaagaactttggattgtggagtttttcgctccttggtgtggacactgtaaaagacttgctcctgagtggaagaaggctgctaataacttgaaagggaaggtgaagcttgtcatgttgactgcgattctgagaagtctctcatgagcaggttcaacgttcaagggttccctaccatcttagtatttggtgctgacaaagacagcccagttccttacgagggtgctagaaaccgctctgctattgaatcatttgctctagagcaactagaaactaatgt

SEQ ID NO: 51980 - DNA, 480 bp, Gossypium hirsutum
  unsure (1)..(480): unsure at all n locations; Clone ID: LIB3197-047-Q1-M1-F4
ctccactccattaaacaaacaccaaaaagaaagataaaccccaaattctcatttttactctatccaaaccctagattcaatcgtcgcccatcttccctccgatggccaattcaaagaaaccgggcggtctccgcgagatgctggaatcgatgtactccgtcatcgctctgctcttcattttagtagcctgcgtcgaactctgcgacgccgccgctcccttcgacgtctaccgtctaatccaatacgacatgtccggttcacctttcggatctcgattcgccgccctcaaccatcacgcggcctccttgcatttccctcccggtgtcgatctttccagaaccgttctcatcatccctctacgtgaactgaatatcactttcgttcgagaatatatcaatcaaaaaaagccgttgggaagattgttagttttgcttcctgaagtacttatctntaaaactggaggaataaccaagttcatga

SEQ ID NO: 51981 - DNA, 370 bp, Gossypium hirsutum
  unsure (1)..(370): unsure at all n locations; Clone ID: LIB3197-047-Q1-M1-F6
cttcttcttctcttcatattggttttttcccttagaactccacgacacagatccaaggagttggggaaaaccctcacacaaattctctctctaaatcttaaccgaaaaggtctccaaaaaagactaccctttttgcccatttactctccttattcaacaaattcagcatcacatccccaaaatagtcgcttttttatctcttgctttcttcatctgcttcaagtcatggctggtttagcacctgaaggatcccaattcgatgctcgtcaatatgatcagaaaatgagtgatttgctccaaacagacggagatgattttttcacttcttatgatgaagtntatgacagttttcgatgcaatgggacttcaa

SEQ ID NO: 51982 - DNA, 451 bp, Gossypium hirsutum
  Clone ID: LIB3197-047-Q1-M1-F7
gagagaaacaaaatccgaagggaatcccaatttcttcgcttttcatcttctctcgcttccatttctccgtttttccccctccggcaatggctatcgattctgattctttcaaacaatcacttctccctagcttcctttactcttctgctcccaactcattctctctggatcgactcctcaacgccaacagccctgctttctctgcttcacgctccactatacccggtgcccccgcggcctcttcctcgccgtcgatcaaggcgagaactttcatgatcccctcccccaatgagcccgggaagaagattgagatgtattcgcctcagttctacgctgcttgtacctttggcggtatccttagcttgggtctcactcacatggcccgtactcctcttgacctcgtcaagtgtaatatgcagattgacccttgcaagtacaaaagtatctcatc

SEQ ID NO: 51983 - DNA, 347 bp, Gossypium hirsutum
  Clone ID: LIB3197-047-Q1-M1-F8
atccttcacatccaaggtggccaatgcggcaggcagataggagccaagttctgggaagtcgtatgtgccgaacatggcatcgattcaacgggtcgatatggtggtgactcggagctccagcttgagcgaatcaatgtttactacaacgaagccagttgtggccgttttgttccccgcgcagttttaatggatctggaacccggtaccatggatagcgtaagatccggtccttacggacaaattttcagacccgataacttcgttttcggacagtcgggcgccggaaacaattgggctaagggacattacactgaaggagcggagcttatcgattccgttctcgacgt

SEQ ID NO: 51984 - DNA, 394 bp, Gossypium hirsutum
  Clone ID: LIB3197-047-Q1-M1-F9
cttgctttcagaaaggtgttcgaagtccctgatttcgcctctcagaaaagatgtcttcagccggcgaagctgcttgctcttacgccgcattgattctctatgatgatggcatccccatcactgctgagaagattgcaactctagtcaaagctgcaaatgtctctgttgaatcttattggccaagcttgtttgctaagctttttgaaaagtgtaacattgaggatctcataaccaatgttggtgctgccggtgctggtgccgcagttgctgcaactgcacctgttgcagctggtgctggtgggggaactggtgcttcacctcctggcgaggggaaaaaagattgaagaaccataggaagagagcgatgatgatatgggattcagcttatttgatt

SEQ ID NO: 51985 - DNA, 449 bp, Gossypium hirsutum
  Clone ID: LIB3197-047-Q1-M1-G1
cggacgcgtggggtcagccaattgtttgagctagctagctcttactcaaatggcaaccaaaacgatgatgttgcaaatatttccacttttcttctttttgttcagtgtctgcaactccattttccttggtgctaatggagatgacaatggtggttggcaaactgcccatgccaccttctacggtggtgctgatgctaccggcacaatggggggagcttgtggttatggaaacctgtacagtcaagggtatggaacgagcacagcatctttgagcactgcacttttcaacaatggctagagctgcggtgcctgctacgagctccggtgcaacaatgatcctcaatggtgcattagtcgaaccataaccgtgacagccaccaacttttgtccacctaactatgctttatctagtgacaatggcgggtggtgcaatcccccacgagaacact

SEQ ID NO: 51986 - DNA, 385 bp, Gossypium hirsutum
  Clone ID: LIB3197-047-Q1-M1-G10
agatgcgagaactgaagtactggggcctcctccactgggtccgaatgagggggagaccccgcccctggattctggaagacctcaccatgggacgcccccgacctcgtgcagccaatacgtggatgttcctgctcttgctgggggaagcctgggcaggacactccattgcacaggaagacaaggtgctggggggtcaagagtgccgaccccattcgcagccttggcaagcagccttgttccatggcaagcaactactctgtggcggagtccttataggtggcaactggatccttacagctgcccactgtaaaaaaccgaaatacacagtacgcctgggagaccaacacctacataaaaaagattggccagagcaagatatacctgt

SEQ ID NO: 51987 - DNA, 410 bp, Gossypium hirsutum
  Clone ID: LIB3197-047-Q1-M1-G11
ctttctccagtttcctcattcatttccatttctcaacacaaattttcatcacccatcaagcttttcatcaatggcttcccttcaacaagcttcaatctctcttcaacccaagcttctttcatcttctcaacaccccagatcccttccctctctcaacctctctttttcagccactttcccttccctcaaactctgcaccactcgccctcttcatggcggtgccaaaatgtcagcctccgccgcttccagctacgccaccgctttagccgatgtagccaagtccaacaacacccttgatgccaccagctccgacgttgaaaaggtcgagaaaatcttctccgacccacaagtcctccagttcttcaccaaccccaccattgatgtcctcaaaaaacgtcaggttttggatg

SEQ ID NO: 51988 - DNA, 225 bp, Gossypium hirsutum
  Clone ID: LIB3197-047-Q1-M1-G12
ctgatgcataagctgatggttgcggaatagaatgaagccaacaacatttgcctccacaaaatgaatgtattgggttttgtcatctctcagtagtttatgggcagttgttgcttgatgaatatgggtatttgcagttttattttgttgaacatgttgaattgagtttgtgggagatttcgatggactaaaaagctctttcgtaataaataatatacaatttattcc

SEQ ID NO: 51989 - DNA, 435 bp, Gossypium hirsutum
  unsure (1)..(435): unsure at all n locations; Clone ID: LIB3197-047-Q1-M1-G2
cggacgcgtgggctaaaatatacaaaccttgttcttctattttagctgctcttcacattgagaagctagctttttggtgtgtttgcttagcttcaatccacattttctttgttgcgaagatggttgcacacaaattcaccgttgatttgaataaaccccttgtcttccaggttggtcaccttggagaaagttatcaggagtgggttcatcagcctattgtgagcaaggaaggtcctaggttctttgagagtgatttttgggagttcttgactcgcactgcctggtgggcaattccaaccatatggctgcctgttgtttgctggtgcatttcaatgtccgtacgtatggggcatacactttcccnaatcgctntaatggttgcttttggcatttttgtgtggacatttgtggaatatgttttacaccgattccctt

SEQ ID NO: 51990 - DNA, 344 bp, Gossypium hirsutum
  Clone ID: LIB3197-047-Q1-M1-G3
caaggaagaaagtgtgagattgacttgtttataatgcaatccgatgggaagaagatagttgatcctagcaagcaaactgcattgtcgtcgcgtctgaaaatggaactgctccaaccactaagagtaactgtagtgagccggggtcctgacactgagcttctagttgcaaatcccgtagagttatcatgcaagtgccggccttttgttttttatgacatcacccttgctctaaagatgcttaatacttgcatcttctcggcagagatggggagacacatgatcagaaatcgagagtgtgaagtcttcaggattctactatatgaacgggctagttcatccattct

SEQ ID NO: 51991 - DNA, 357 bp, Gossypium hirsutum
  Clone ID: LIB3197-047-Q1-M1-G4
aaacattcctatctaattctctcccaaacaatggtgaatttttttttatagatgatctgtttgcctttaaagaaaacgaagcaaaacccacatatgtttttcatgaaattcgattcacttttaatatataagtcttgcccatatatatatacatatatatatattggcttgaatttttttcaattttgattgccctttgatattctaacaaaggtcgaacatggggaatttcaatgccaccgacttgaacgagcgacggaggaactccatccggcagatctacactacgcaagctcaacacccaccacattcctctcgttaaccgcaaacggggttcaacgccgacccttactccta

SEQ ID NO: 51992 - DNA, 370 bp, Gossypium hirsutum
  Clone ID: LIB3197-047-Q1-M1-G5
ggccaacgtacaaggagggtgtcgggtcggctgccaagagttttggtcttggctccgactcgggagttagccaaacaagtggagaaagaaattaaggagtcggcgtcttatttgaacacggttagcgtttatggaggggtttcttataatttgcagcgaaatgctctttcccgtggggttgatgtagtggtcggaactcctggtcgaatcattgatctgatcgaaagtaaagacctcagattgggggaagttgaatatctggtccttgatgaagctgatcagatgcttgctgttggatttgaggaggctgttgaagagattttagaaaatctaccatcaaagaggcagagcatgcttttctctgcaacca

SEQ ID NO: 51993 - DNA, 411 bp, Gossypium hirsutum
  Clone ID: LIB3197-047-Q1-M1-G6
gcttgggaacatattctggcgcttcatagaaggagggtggcaaaagaagagagtgggtggtgctgatctattatcattggtttcagatgaagtttttcaaccagacgtggtttggaagcttctcgatctacaagttacttgcggaactcttggtctttctactgcaacagttaaactcatcgatgctgatgggagaaagcatgttgcctgctcagttggaactggacctgtagattcagcttataaagctgttgatctcattatcaaggaatcggtttcacttcttgagtactcaatgaatgccgttacggaaggaattgttgctatagccactacccgcgttcttaattcgtgtagagaaaagtcacttatctactcatgcgttgactggtgaactctgtcatcgtacat

SEQ ID NO: 51994 - DNA, 371 bp, Gossypium hirsutum
  Clone ID: LIB3197-047-Q1-M1-G8
cggacgcgtgggcccatctctcctctcatactgcactctaacgttccctttgaggttttaggaaaacagcagagaaattaaggaatggagaccttcctatttacctcggagtctgtgaacgagggacatcccgacaagctgtgtgatcagatctctgatgcagtcctcgatgcctgtttggcacaggatcctgagagcaaggtggcttgcgagacctgcagcaagacaaacatggtgatggtgtttggtgagatcactaccaaagccgacgtagactacgagaagattgtgcgggacacctgccggggcatcggtttcacatctgacgatgtgggtctggatgccgacaactgcaaagtgctggttaacat

SEQ ID NO: 51995 - DNA, 467 bp, Gossypium hirsutum
  Clone ID: LIB3197-047-Q1-M1-G9
ctctctcatggaccttcattcgaccaatgggggaaaatctttaaatgatgacatcgtccttttgcccaccactatcaaatttccagattttccaggaaaaagaaaatcaaaacccccaggtgaagaaggtgaaaaccagcagcggcaaaggcaataaaaggtgaagccaaagagagagagatatatacataataaaaaagacttttcaaaagaacacaactatggctcctcataaagaaggatcagatgcttcagtggaagccatggttgctcaagtcgaaaaacacccaatttcatcgatccttatcatcattgctatgcaaacagaaactttgccggtggtgaataaattccaattgattgaaaaccctcattcttcgtttccaaaaggggtcccttggatccattatcatggtgcattacaagacatcataatcaatctatttgggcttgaaaagattaacctt

SEQ ID NO: 51996 - DNA, 286 bp, Gossypium hirsutum
  Clone ID: LIB3197-047-Q1-M1-H1
gtacgaggctcaggaaaaagagttgattcaattgaagcgggaggcaaagttgaaaggaggattctatgttgatccaaaagctaagcttttgttaattgttagaatccgcggtatcaatgccatgcacccaaggaccaaaaagatcttgcagctcctacgtttgagacagattttcaatggtgtttttcttaaagtgaacaaggcaacaatgaacatgcttcaccttgttgaaccttatgtgacttatggatacccgaatctcaagagtgttaggggactcgtttac

SEQ ID NO: 51997 - DNA, 412 bp, Gossypium hirsutum
  Clone ID: LIB3197-047-Q1-M1-H11
caaaaaggaaagaatgatgaacccccctagcaactccaaaacccccaaaaatttctcgccattcaaacaaacccctcctctccaagacctccagcaagccttctcgaacatccagacccactgctcttctctcttccgacaaactcaaaatcagttaatggacgcttttaactccaccttttctcactttaatccgccttctttttctccaaaagggccggtttttgctcgaattgctgattctagcaagacccagattgctttgagtaaaaaaaacggtgatgccatgccggcagagaaattagaagagagattggctggggttccggtctatgccttgagtaactcaaaggaggaattcgtgttggtttcgggtgtttcgacgaaaaaatcacttgggttggtgtggttc

SEQ ID NO: 51998 - DNA, 388 bp, Gossypium hirsutum
  Clone ID: LIB3197-047-Q1-M1-H12
atctgggttgtcgtttctatagctgaagaaactcttcaatggctgaaaagagcaaggttttgatcatcggaggaactggatatctgggaaagttcattgtggaagccagtgcaaaagagggtcatcccactttcgtttttgtaagggagtccaccgtctccgaccctgttaagggaaaacttgtcgacaacttcaagaacttatgggtccatttgttgttaggggatatgtacgaccatgagagtttggtcaaagcaataaaacaagttgatgtggtgatttcggttgtgggtcaaatgcagttagcagatcaaggtaagatcattgctgctattaaaaaaactgggaatgtcaaaaaatttttcccatccgaatttggaatggacgt

SEQ ID NO: 51999 - DNA, 454 bp, Gossypium hirsutum
  unsure (1)..(454): unsure at all n locations; Clone ID: LIB3197-047-Q1-M1-H2
gtttcatcggcaagaatacgacgccgtatcccactactcggtgcgttttgcgtcctgggtttggggttccccagtctctgctcaatactcccttcttcctcttacctcaagacgagttgtcctcagtctccccattttgttcatatagaaaggtcgaaattagtacccaatcagcagataagactgttcaagctgtgaaaatggaggtgaatagcaacattgttccaagcatcgtcgtctatgttactgttcctaacagagaagcangtaggaagttggctggaagcatcgtgaaagagaaactgcagcttgtgtaaatatagtacccagtcttgaatcggtgtatctatgggagggaaagataaactcagatcctgaagagatgctcataatcaaacaaggcatccctcttgtagctctacagagcatgtgatggcaatcacgatatgatgtg

SEQ ID NO: 52000 - DNA, 325 bp, Gossypium hirsutum
  unsure (1)..(325): unsure at all n locations; Clone ID: LIB3197-047-Q1-M1-H3
gcttgtggttatggaaacctgtacagtcaagggtatggaacgagcacagcagctttgagcactgcacttttcaacaaatgggcttgaggctgcggtgcctgctacgagctccggtgcacaatgatccctcaatggtgcattagtcgaaaccataaccgtgacagccaccaacttttgtccacctaactatgctntatctagtgacaatggcggtggtgcaatccccacgagaacatcttgatttggccgaaaccgcattctttgcggatagcagaatatcgagctggaatcgtcccttgtatgttcagaaaggtgtcatgtgtga

SEQ ID NO: 52001 - DNA, 433 bp, Gossypium hirsutum
  Clone ID: LIB3197-047-Q1-M1-H4
gtttatggggacctgagtacttctcctctttatgtctacaaaagtacatttgctgaagacattcaacattcagagacaaatgaagagatttttggtgttctatcctttgtcttctggacccttactttagtccccttattcaagtatgtgtttgtggttcttcgagcagatgacaacggagagggaggtacttttgcattatattctctgatatgccgacatgcaagagttagtcttctgcccaacagacaggtcgccgatgaagcactctctacgtataaacttgagcaccatcccgagaaaaagagtagttcaagagtaaaactgtaccttgagaagcataaggtcttgcacactgctttgttaatcctggttcttcttggtacttgtatgggaattggagatggagttctcactccaaccaattctgttt

SEQ ID NO: 52002 - DNA, 354 bp, Gossypium hirsutum
  unsure (1)..(354): unsure at all n locations; Clone ID: LIB3197-047-Q1-M1-H5
aagagattaaaggtggactttcagctttgcgaaatgtgggaaaacctacaaacaatggtgccctaggaactgctagtgctcctatccacatggtgtcttcagaatcagggaattttaaagatcaattgtggcgtatttttcgcagtcttgcacttggcttcttgttgatttctggtattggtgcacttattgaagatagagggattagtaaaggacttggtctacacgaagaggtgcaagtggtggaatctaacacanaatttaatgatgtcaaaagcgttgatgacgcgaacgcagaattaaaagaaaatgttcactaccttcgagatcctaaagcgtttactcgtcttggag

SEQ ID NO: 52003 - DNA, 374 bp, Gossypium hirsutum
  Clone ID: LIB3197-047-Q1-M1-H6
acctcccgccaattgtttgagctagctagctcttactcaaatggcggccaaaacgatgagggtgcaaatattttcactcttattctttctgttcagtatctgcaactacattttccttggtgctaatggagatgacaatggtggttggcaaactgcccatgccaccttgtacggtggtgctgatgctaccggctcaatgaggggagtttgtggttattgaaacctgcacagtcaagggtgttgaaacgagctcagcacctcccagcactgcactgtttaacaatagcttgaacctcagtgcctgctacgaacttcaatgcaacaatgattcgcaatggtgcatttttctgaccataaccgtgacagctacctac

SEQ ID NO: 52004 - DNA, 445 bp, Gossypium hirsutum
  Clone ID: LIB3197-047-Q1-M1-H7
cccacgcgtccgaaattgttatctctgaaggtgtcttaataaacgccttcgatttaccttcgatttccatttacttctctattgctacgtttttgaatttttagtgagcgaaaatgagagagtgcatttcagtccacatcggtcaggctggtattcaagtcggaaatgcctgctgggaactttactgccttgaacatggaatccagcctgatggccagatgccaagtgacaagactgtcggaggaggtgatgatgcttttaacacctttttcagtgaaactggtgctggaaagcacgtccctcgtgctgtctttgtggatcttgagcctactgttattgatgaagtgaggactggtacttaccgtcagcttttccaccctgagcaactcatcagcggcaaggaagacgctgccaacaacttcgctcgtggccactacactattgg

SEQ ID NO: 52005 - DNA, 397 bp, Gossypium hirsutum
  Clone ID: LIB3197-047-Q1-M1-H8
ctgattgaatgcagttggagacttgaaccacttgatttctgccaccatgagtggtgtgacatgctgccttcgtttccctggtcaattaaactcagatctacgcaagcttgccgtcaatctcattccattccctcgcctgcatttctttatggttggctttgctccacttacttctcgagggtcacagcaatacagggctcttactgttcccgagctcactcaacaaatgtgggatgccaaaaacatgatgtgtgctgctgatcctcgccatgggcgatacttgactgcttcagccatgttccgtggcaagatgagcaccaaggaagtcgatgaacatatgattaatgtgcagaataagaactcatcatactttgtggagtggatccccaataatgtg

SEQ ID NO: 52006 - DNA, 408 bp, Gossypium hirsutum
  Clone ID: LIB3197-047-Q1-M1-H9
cttaaattcttaactaaaatattaggacctagaagatcgtcgctccgcttacacgcttcttctattatttccaaattcccaatgctctctcacaagccgaagcttcaaaattcttagatctccgcttcaatttgagttgtttcctggaaattttttaaaaatttccatcttattcatttttacagtatcaggctgcctttgaagttaattcataatggttgatagcaacaaatcttctggtccacctgaagaaaccccaagccataatcccaatggaaatgtaccttcagaaagtgaccttgcactcgatgagataactgagaaagttcaagagtcccttggcctcgaaaagagacacaagttttgggaattccagcctggtgggcaattcaaagacttgggagacac

SEQ ID NO: 52007 - DNA, 412 bp, Gossypium hirsutum
  Clone ID: LIB3197-048-Q1-M1-A10
aaaaaaatggaataccgcaatgtttttcccatttttgttattttttcctttttcatcgttggcgtgatttgtacggagactttctcggcggagggatttgaagttgatccgttgatcgaacaagtaacggacggtcacgaaggagccgagccgcagctgctgacggcggagcatcacttctcgctgttcaagaagcggttcaagaagtcgtacggatcacaaaaggagcacgattataggttcaagatttttcaggttaacctgagacgagcggcgcgtcatcagaatcttgacccgtctgcgactcacggggtgactcagttctccgatttgactccaggcgagttcagaaaggcatatttgggattaaggagattgagattgcctaaagatgcaactgaggctccgattt

SEQ ID NO: 52008 - DNA, 387 bp, Gossypium hirsutum
  Clone ID: LIB3197-048-Q1-M1-A12
cggacgcgtggggattgatttgcgtttgtccttgaaggaagagacactaaaagcgaaaagagagaagaggagaaaatcagccgccgccgccgccattgccattgccttcgccgacgccgacgcccattttccattagcatcggcagctgtgatttactgtctatatataatataaccataatctatgccagtcccagccttcgggtattcttttatttccttatgaacgccttggacaagccgtgttgctcctcttcctcctcctcttccaatctcagccgcttcattgccggcctcttaatctcccttctcttccattcattccagctgatttctaatttcctcactcctatacacccgtaattcttcgtttctaatccatggatc

SEQ ID NO: 52009 - DNA, 396 bp, Gossypium hirsutum
  unsure (1)..(396): unsure at all n locations; Clone ID: LIB3197-048-Q1-M1-A4
cccacgcgtccggaagaaataccgataggaaagctaaataaggtcactcgaaaaccgaggggaaaaaagagaaaacgacgagagattaccaataaaacgataaaggtacttaaggacgatattgcctggcccatgatggaaaacgagaagaaatatgtcaaggagcgacaacagcaactgaagggcggaaatggagtaacaaaatctgttggtgaacaagatcaaccacaacgaggtaagatggttagtgaacaaggctcacaggacccaaaaattgacatcagaaccaaaacgctggtaaatcctttcgatggagatgtaaataacttgaagattntcacctccgagcgttctgctcgtctattagaaaagaaaaagaaaaaaggtttaaagcac

SEQ ID NO: 52010 - DNA, 406 bp, Gossypium hirsutum
  Clone ID: LIB3197-048-Q1-M1-B10
cagtgggttatgtgtccaaaatcaaaaactggctgaagaagcttcatatgcgaaagaattggcatctgcagctgctgttgagttaaagaatttagctggtgaggtgaccaggctttcagtgcaagaatgcaaaattggagaacgaattattggctgctagaggatctgctaatcaaactataaatggtgctaaccggaagtatagtgacagcacaagacctgggaggaaagggctgcactcttgcccatctcatgacttttctggaacaggtggtgaagactttgaattgtggaaatctgatctagatgatctaaagatggaatcgcatgcgttgaaacaaccggaggcagctcttgtagctacactagcccagaaagaattcatagaagttgaatacagggaaaa

SEQ ID NO: 52011 - DNA, 391 bp, Gossypium hirsutum
  Clone ID: LIB3197-048-Q1-M1-B11
tttggctctcaaccaagcttgcaaatttgcagcctcttcttcaatccgttcaagccgattaatcctcagctttctgttttcggaagttactactttacctagtgatggcagacggtcacgagagtgacaagaatattgagatatggaagatcaagaagcttattaaagcacttgaagccgctagaggcaacggcaccagcatgatatctctcataatgcctccacgtgatcagatttcaagggttaccaagatgctgggagatgaatttggaacagcttcaaacatcaaaagcagagtcaaccgtcaatctgtgttaggtgcaatcacatctgctcagcagaggctcaaactttatagtaaggttcctcccaacggacttgtgctctacac

SEQ ID NO: 52012 - DNA, 317 bp, Gossypium hirsutum
  Clone ID: LIB3197-048-Q1-M1-B12
gaaaaaagcacagaagataaaaatgggggagaatacaaataaatagaagaaaacaaaatgtataataacatatgaaaaaataatagaaaacgtctcaaaataaaaactaaaaaaatatgacgaaagggacaaaacatgttaaaaaaaagtcaatcaatagaataataaaaagtgctaaaaacgaatgaaagcaacaagaaggagaatgatatatcgaatacatgcctacacgtgaggagcttatgaaaacaaaacgaaatgctgtgaggaaaaattgcaaacagataatgccataaaaaaaaaaaattaaacgaaaa

SEQ ID NO: 52013 - DNA, 460 bp, Gossypium hirsutum
  Clone ID: LIB3197-048-Q1-M1-B4
ggagctttgtcggtttagtggtgccaagatatacccagggaaaggcatcagatttatccgttctgattctcaggtcttccttttttcaaactcaaaatgcaagaggtacttccacaaccgtttgaagccatcaaaacttacatggacagccatgtataggaagcaacataagaaggacattgctcaaggggccgttaagaagaggagacgtgccacaaagaagccatactccagatccatcgtcggtgccaccttagaggttatccaaaagaagaggagcgagaaacctgaagttcgtgacgctgctcgggaagctgcactccgagaaatcaaggaaaggatcaagaaaaccaaggatgaaaagaaagcaaagaaagccgaagtagcggcgaagcaacaaaagacgcagggcaaaggtaacattccctagggtggtgcaccaaaaggtgccaagctcggc

SEQ ID NO: 52014 - DNA, 342 bp, Gossypium hirsutum
  Clone ID: LIB3197-048-Q1-M1-B5
cacaagttcattggggaagaaaccactgctgcttggggggcatcaaagctgactggtgagcctacctggataggtgatccccttgatgggaccaccaattttggtcatggggtcccccttggggggggctcccatgggcctaccattgggaaaggttctaccaatgggggtggttaccaatccattatgggagaaccctttactgtgttgaccttgaaaaagggcctttcttaaccgggcccccattagaagtttattttcaaaccgaccttgggaggcttttccttccaccaaaggtgggaccaaaccaaattaggttaccgggggtggttcctccaaccc

SEQ ID NO: 52015 - DNA, 429 bp, Gossypium hirsutum
  unsure (1)..(429): unsure at all n locations; Clone ID: LIB3197-048-Q1-M1-B6
agaacgtcatgcaccatttcgggaaccccaacttcgagcttatccgccacgacgtcgttgaacctttactcttggaagttgaccagatctaccatctcgcttgtcctgcttctccagtccattacaaatttaaccccgtcaaaactatcaagacaaatgtggtgggaacactgaacatgttagggctggcaaaaagagttggtgccaggttcttattaaccagtaccagtgaagtatatggagatcctctacaacatcctcagaaagaaacttactggggcaacgttaatcccatcggtgtccgaagctgctacgatgagggaaagcgtacntgccgaacgttgacaatggactatcacagaggggcccggagttgggttaggatcgccagaattttcaatacttacggaacctcgatgtgcatcgatg

SEQ ID NO: 52016 - DNA, 507 bp, Gossypium hirsutum
  Clone ID: LIB3197-048-Q1-M1-C10
tggaacgctgaagcacgctggtgcccctccgcaatttccgggatcggatccactcttgcatcgccagcgcatccctgagacaccatgggggaggtgaaggtcggagtcaacggatttgctcctattgggcgcctgttcaccagggctgcttttaactctggtgaagtggatattgtatgccatcaatgaccccttcattgacctcaactacatggattacatgttccagtttgattccacccatggcaagttccatggcacctctaaggctgacaactggaagctcgtgactaatggaagccccatcaccatcttacaggagcgagatccctccaaaatcaagtcgggcgatgctggcgctgagtacgttgaggagtgcactggcgtattcaccaacaccgataaggctggagctcatttgcagggaggagccaaatgggtcatgatctctgccacctctgctgacgcccacatgttcgttatgcgtgtgaaacatgagtagtatga

SEQ ID NO: 52017 - DNA, 422 bp, Gossypium hirsutum
  Clone ID: LIB3197-048-Q1-M1-C11
gcgttcgccagtcgagagtgacacacatggcattgggatggagcctgtgcatgccgatgaaagaagagttagatctgccatcgatgatgacttcgaatctgatgtgaggaccaacatggagttgcagttgccagaggagctacacgatctgtcagcagcccaataagccgggactgcattcatactagggcactcacatgttccagcaaagcatggatcatctgattttaagagattggccattaactttgggtactatcacttgagagagaattgccgaagaccagatgtggcacttaacgctccacacagtatctatgctagatgctggcatgagttatgtggtgaaagcctctgatgtaagtaggtttggtcgatatgcgtgatgcatatggccgacctggcaagaaatatctttttct

SEQ ID NO: 52018 - DNA, 468 bp, Gossypium hirsutum
  Clone ID: LIB3197-048-Q1-M1-C12
gttttaaggagggattggtccagatattaaaatccgaattatctcaaaaggaggctgatgcaagtagatttcatgaagtttctaaaatgtcgaggcaggtagagttcttaaggaagcctagaagttcatctcatacgcctgtaataaaacattgtacagctagggaaggaactgttttgggagacgagaatggcggcggcaacaaatgcagcgtaaacatgaagaaaggaagctccgctccacatgttcatgattctctgaaggacaatggaaggggaagcagaagttcgaagaggaaaaaggatgatgaaattcgtatttctgaaactccaaatctattcacttctacgtttaaagttcccagattgagagactcctctcccaagtcaagatgatctttcttctaaatctactcatccatttgtatcttttaccaatgattgaaatagtgtctgtgatcgtgaattt

SEQ ID NO: 52019 - DNA, 384 bp, Gossypium hirsutum
  Clone ID: LIB3197-048-Q1-M1-C4
gcaagatctcaattctcaaattgtagcgcccttttatatcaagcaatggctctggtcttgcatgctggaaaaacaaacaaaaatgcctttaaggcactcattgctgcagaatatagtggtgtgcaggtcaaaatggttgagaattttgagatgggtgtgtcaaataagactcctgagttcatcaagatgaaccctttggggaaggttcctgtgttggaaacacctgagggtcctgtatttgagagcaatgccattgctcattatgttgctcgctcaaaggttaacaaccctatatgtggttctacattgattgattatggtcatatcgagcaatggattgatttcgcagccatggaaattgatgctaatattgcaaaatggttg

SEQ ID NO: 52020 - DNA, 451 bp, Gossypium hirsutum
  unsure (1)..(451): unsure at all n locations; Clone ID: LIB3197-048-Q1-M1-C5
atcaaaatccccttctcataaattttctctcttgaagatttcatgcctacccacctttaatctcaaccaacggaagagacgcggtgtgcaatttgactgttccaatttccttttcaacattcaattaaaaccctagcctcttccttttgcttctatcgggagggggggagggaatcatgtctttcgatctcatatgctgaagccgtcctgcagctgcttcggattcttccaagatctgtacggctgaggaccaaaagaagaaagatgatgaggatctggtgagtggctgttcgggatttcgccctcgctgattctctacaccgcanatctatgctattcacgtctttgctctcctttccctcgcttgacattagcattntgtattgaatcaaaatgcatggttaggatttgacattttgccgactactgcatcaaattacttcagtcttga

SEQ ID NO: 52021 - DNA, 397 bp, Gossypium hirsutum
  Clone ID: LIB3197-048-Q1-M1-D10
tcttttgttgtgaagaaaaaaatggttggtgtgtttaggttagtgagggggtatcctggaccaagtggctttggttcagcctccaccgcccaagaggttaccgaaaggattgatggaaccaacttgactgctctagttaccggaggagcaagtggaattgggttggaaacttctagagtattggctcttcgtggagtccacgtcatcatcggtgcaaggaacatgaaagccgcgaatgaatcaaagaacaaaattgttagagagaacacaagagcccgtatagatgttctggagctggatctttgctctactagttcaatcagatcatttgccgacaatttcattgctcttcatcttcctcttaatatcttaataaacaatgctggcatcatgtttt

SEQ ID NO: 52022 - DNA, 433 bp, Gossypium hirsutum
  Clone ID: LIB3197-048-Q1-M1-D11
cccacgcgtgcgcctatatctgcaaaaattcaatacctgcttcagattggcggtaagctgcacggaattgttgtgaaatacagtccagatggaaagctgttgcaggttttggaggatagtgaagggaaggttgtgaaagcggttagtgaagtcgaagagagggatggcaagctctggctagggagtgttcttatgccctttgtggcagtttacaacttggcttgagttgggaggcaaaaggaaaaataaagagttagcaatggtgttttatgaatgtggcaaatcttctcttagccatcgttttcactatgaagaaaaacacaagaatgttttctaagtctatacatgttattggcagtggggctgtattacttggattgcaagtatttggataaaattctgctgaaaagaaagtatttgggtttttccattt

SEQ ID NO: 52023 - DNA, 396 bp, Gossypium hirsutum
  Clone ID: LIB3197-048-Q1-M1-D12
cccacgcgtccgaacacacttgctagtattcctacttggagtggtgactctcaccactcccacatttggtacctatgagtcaccaaattatgggaaaccccctactcctgtattcaagcctcccaaggtgaaaccaccaccatatgaacctaagccaccagtgtatgaaccaccaaaaaaggagaagcctgaacctaagccaccggtttatgcacctccaaagaaagagaagcatggacccaaaccaccaatgtatgaacctccaaagaaagagaagcctgagccaaagccaccagtttatacacctccaaagaaagaggagcctaaacctaaaccaccagtatatgaacctccaaagaaggagaaacctgagccaaaaccaccgatttatacacc

SEQ ID NO: 52024 - DNA, 385 bp, Gossypium hirsutum
  Clone ID: LIB3197-048-Q1-M1-D4
catcggataaagggtcagggaaagaggagctgcctccgacgccaccgccgcaagcagtggagtcagaatctgagccacctgttgtcaccgaggcaccaaaggaagaaaacccaccagctccagcagcagaaactgtagtgatatcggaatccgagccgcagcagccgcctgctccactgcagcaggaggtggttacggagtcggagtcactggcggcgatgatggagaaagaagagacgggagcaccagcagagcctactgcggcgggtactactactactactacaactagtgctcaagaagaggtggctgctgctgttgaagagaaaaaggtcctcaaaatctggcttctttcaaagaggaaagcaacaaggaagctgatcta

SEQ ID NO: 52025 - DNA, 385 bp, Gossypium hirsutum
  Clone ID: LIB3197-048-Q1-M1-D6
cttccatatccaacaagagcatttgatatggctcagtgttctcgatgcctaataccatggactgcaaatgatggaatgtacttaatggaagttgatagagtcctgaggcctggtggatactgggtgttgtctggccctccaattaattggaagacctactaccaaatttggaagcgaactaaggaagatcttaaggctgagcaaaaaaagattgaagagttagctgaacaactttgctgggagaaaaaatatgagaagggagatattgctatttttaggaaaaaagttaatgacaaatcctgccgcaggaattctgccaatatgtgtaaacctaggggttcagatgatgtttggtacaagaaaatggaaacatgcataacccctt

SEQ ID NO: 52026 - DNA, 469 bp, Gossypium hirsutum
  unsure (1)..(469): unsure at all n locations; Clone ID: LIB3197-048-Q1-M1-H1
ggcgattcctaaacgaaaccctattttcctatctgtaatctttgtttcgctcctcgccatcgcctccgctaaagtattcttcgaagaacgttttgatgagggatgggaaagtcggtgggtaaaatctgactggaaaaaggatgagaacatggctggggagtggaattacacttctggaaaatggaatggagatcctaacgacaaaggtattcaaactagtgaagactacaggttctatgctatttcagctgagttcccagaagtcaacaacaaagataagactctagtcttccaattttctgtcaagcatgagcaaaagcttgattgtggtggtggctacatgaagttgctcagcggtgacattgaccagaagaaaattggtggtgaaaccccatacagcatcatgnttgggcctgatatctgcngctatagcactaagaaagtgcatactattctcacctacaatggg

SEQ ID NO: 52027 - DNA, 325 bp, Gossypium hirsutum
  Clone ID: LIB3197-048-Q1-M1-H2
ctttgtgaccattaaggttgtgatctaaattagccctatgaatatagcagttcattgttaaccttgatacatgttccttcttcacccaatgatcgtctctcaattttagatcaggcatggcaattgtggacctactgaatctctagaaatccaaagacaacttggtgctcgatcacctgttttttatcggttggaacaagttagtaacagccccagttctgttgggtatatgaggctaaaggagttcaatgcattggctagaaaagatctggtcatgggtaattttatttttattttagtggatctcacctgatggctatttatg

SEQ ID NO: 52028 - DNA, 445 bp, Gossypium hirsutum
  Clone ID: LIB3197-048-Q1-M1-H3
aaaataccattcaatcaaatgaaatctcttagggaatcatgctacaagatgttaaacctaaatgttgaatagctagaaggtttccagggtctcaccctgtttcactcaacagggataatttgcaacttttgaggcaacattactattatgctacatggaaagctgatgggactcggtatatgatgctaataactgtcgatggatgttatttgatcgatagacattttaatttccgaagagttcagataaggttcccatgcagttacggaaatagtactcaccattataccttgcttgatggagagatggtgattggtactttgccatgttctcaaaacaaggaaagaagattcttggttttcgatatcattgcttgtaatggaaataatctgatggagaaaccattctctgaaagatggaatatggtggagaaagaaatgatcga

SEQ ID NO: 52029 - DNA, 405 bp, Gossypium hirsutum
  Clone ID: LIB3197-048-Q1-M1-H7
gcttccactaccaattccccatcaaccggcctcacccttcctaatttctccattcaaacttcaacattccttcccaaaacatctcaacgttccatatttaagaagaaaaagcctttcaactttaactccaaaagagtagtgtcatgcaaagccagcaatgggaaacaaaacgatgcagacacttcttttctcaataggttcgatagaagggatatccttcttggccttggaggaagtctctatggtgcaaccagccttgttagagacccatttgcattggcagacccaatcgagcctgacctgtccagctgtggggaatcaaccgtagataccagtaaagcctgcatgaatgtcccttgctgcccaccaaagttaaaagattcaaagatcataaacttcgaacca

SEQ ID NO: 52030 - DNA, 412 bp, Gossypium hirsutum
  Clone ID: LIB3197-048-Q1-M1-H8
cccacgcgtccgggggaacccaaaggttctgcgtcgttcggccatcatttcatcactgcgacgatgaatgacgaccttcggtgaccccccctttttgctctttcattcactccagcgtggaactcatcgatttaagccccgaaatcccatctccgacttcgatttcagcgaaggagacgaggtcttcaatagctcgtacgcaaaggtaaagtttcactctccctcttttattttattatacagaaacatatgaaagcgaaaggaatatgaaacagatgcgaaaaagaaaagaaaaaaaagcacgaggagttcgaaaagatcaccttcttggtctattgcttttctattgatttgctgtctgtggttggatttgtgtggttctctcaaaaaaaaaactttacaatcgaaaatc

SEQ ID NO: 52031 - DNA, 399 bp, Gossypium hirsutum
  Clone ID: LIB3197-048-Q1-M1-H9
taagaaattcaatgaaatcatgagtcggcctgagataaatgagaagcttgaagcattgaaggctgaggttcaaaattcaggttcatccagctttgctgatttagatcaagggcttaaggacaaagttctgaatacgaggaaagaagtagaactggaaatgattagcgctctcaagtccattggtttggttgttgagggtgtaaaatctaatgaaaaagtcctaagtgagaaagattcaccctcagtcttcaaaaataaggtggatcatttgaatgaagaaattaacaagaaaattgaaaacgttgtcagttcatcggaattgaaaaatatgattgagttgttgaagctggagatagcaagggcaggaaacaaacctgatactgagtcaaaaagtaagat

SEQ ID NO: 52032 - DNA, 430 bp, Gossypium hirsutum
  Clone ID: LIB3197-049-Q1-M1-A1
aaagataagaaagtaaaacatggaattcgaatagctggcagtgtaatcacagcaggacttgctcttgctgcaaggggtaagaatcctatgagtcgatctgaagatccattctccgctttgtctgcgtggacaccatctctatgtgtaaatcctgcagaccacctatgctccgagtacattggttattttgagcaccgaaaaaagatggaagagattggagctggggctattgagaggttagcaacccaccattcattgggaggcctatttatgagtgtcggacgaaagggtgtggaagccgcggaaccactgcatctgcttccttctgcaaatctgacagggaatctgagtccttccaatgatttcaagcacgcccatgggatccacccatggtggagacctgacctgagcttgaagtgcagtctttaca

SEQ ID NO: 52033 - DNA, 235 bp, Gossypium hirsutum
  Clone ID: LIB3197-049-Q1-M1-A10
gggagctggtgcttggggaagtgtgttcgcagctttgctgcaagatagctacgggcagtttcgagacaaggttcaaatcagaatatggaggaggcctggaagagcagttgatagagctaccgcagaacatctctttgaagtgatcaattccagggaagatgtattgaggaggttgatacgacgttgtgcctatttgaagtatgttgaagctagactaagcgatcgaacactattt

SEQ ID NO: 52034 - DNA, 256 bp, Gossypium hirsutum
  Clone ID: LIB3197-049-Q1-M1-A11
ggcgggattacccgctgagtttaagcatatcaataagcggaggaaaagaaacttaccaggattcccctagtaacggcgagcgaaccgggaaaagcccagcttgagaatcggtcgccatcggcgtccgaattgtagtctggagaagcgtcctcagcgacggaccgggcccaagtcccctggaaaggggcgccggatagggtgagagccccgtcgtgcccggaccctgtcgcaccaagaggcgctgtctacgagtcgg

SEQ ID NO: 52035 - DNA, 317 bp, Gossypium hirsutum
  Clone ID: LIB3197-049-Q1-M1-A12
cccacgcgtccgaacggcttaaagatcaaagtaagggaaaggacggggttgatacatccaaacaacgccagtcgcaagaacaagcaaggaggaagaagatgtcgagggcgcaagacgggatattgaagtacatgttgaagatgatggaagtgtgtaaggctcaaggttttgtttatgggattattccggaaaagggaaagccggtaactggggcatcagacaatcttcgagaatggtggaaggataaagtgaggtttgatcgtaatggtcctgctgctatcgcgaagtaccaagcggataatgcgatttccgggaac

SEQ ID NO: 52036 - DNA, 323 bp, Gossypium hirsutum
  Clone ID: LIB3197-049-Q1-M1-A2
gcagaataagcttgtgcgactcgtatgtgttttcttgcagagtttaatccgaaacaaaattattgatgttaaggatctgtttatcgaaattcaagccttctgcatcgagttttcaaagattaaaaaagcaaccggtttatttaagctggtgaaaaccttggaataaagggtgcctgtgttctatcccttacctgcatttaaacaaagttctacctcgtaagaaagtgtagattatatgattgtagtttgggacccgataactgctggctttagatattccgaaactgaaaaattagtccgcaatgcgtttgcaggaataatat

SEQ ID NO: 52037 - DNA, 448 bp, Gossypium hirsutum
  Clone ID: LIB3197-049-Q1-M1-A3
ctggatttgagattctcgctggacgaagagcaaagaaccctagctagtttgctgagttagattggcctaagaaggctcagccaacctctgcttttactccggtaattgacactcgtcgggtcccctccacctttcctacctttcaattctttgctttgcggagcttctttggagcaaatgggcaatggagcttgtggagcaccgctctctgttggaggaattgctcacttggtgtcagcttgatgctttttagtttgcaatcatacataggggtataggaaggtagttggaaaatcatggtggagtttctggttttgtttcattttatgattggcgattgctgcttccttatgaagcactggcaaaatgttcatgggaggatgaggagaccaaattaagttactaatattttataccttgtggagcatctttggagcaaatgagctat

SEQ ID NO: 52038 - DNA, 262 bp, Gossypium hirsutum
  Clone ID: LIB3197-049-Q1-M1-A5
aaatcgcctgaagtcatctctctcaaacgatggaaaatttcaaggggcaacctcgtcttccaaaattcgcggtacctaagcgctacgatctccagctgaagcctgacctctcggcctgcaaattcgccggttccatctcgatcgacgttgacatcgtcgccgaaactcgcttcatcgtcctcaatgccgccgaactctctatcaaccctggatctgtctctttctcccctcgtaactcttctaaagtatttgatccgaaaaa

SEQ ID NO: 52039 - DNA, 226 bp, Gossypium hirsutum
  Clone ID: LIB3197-049-Q1-M1-A6
ctgagaaagagatgggcaggacgaaaggagtggcggagttcgaagaaacggcgccggttgacttggacccggacgatccctacaaagaccctgtggccatgcttgagatgagggagcatataggtcgagagatatggattgacattgtgaaagccaagatcctgcgtgacatggtcaggtggtgctaccgcatctattgggtcaaccatgtgcagaagtgccggca

SEQ ID NO: 52040 - DNA, 456 bp, Gossypium hirsutum
  Clone ID: LIB3197-049-Q1-M1-A7
cccacgcgtccgatgctatccttttttctttaatttccaagtacatttcttcattctttttttattgcccataaacatgccaaaattttcctcaccctcttcctatttcttgctcttctcgcttgctctttgtttctactccagttccaatgccggtagcagccatgaatttccggtaaatgtgccacctgctgagtttgcaggctctctaaggaccaccattgatgctataagaaaagtgatccccatcgtttcccagtttggcagcttttttggtgattttcgactttctaatgccatttctgattgccttgatctcttggatttttctgctgatcagctaagctggtctctgtctgcttcccagaatccaaatggtaaacacaacagcaccggtgatgtagcttctgatttaaggacatggttgagtgctgcaatggcaaatcaggagacatg

SEQ ID NO: 52041 - DNA, 460 bp, Gossypium hirsutum
  Clone ID: LIB3197-049-Q1-M1-A9
attcggatcaccggcggccaagccttgattcttcgagacggagtatagatgtcggggccactcgatcgattcgctcggccttgctttgaggggttttatggtagtgatgagaggagagagaggaaatctgatttcgagaactcagaggatgaaaggcgcacaagaattggatccttgaaaaagaaagcaataagtgcatctgctagatttaagcattctcttaaaaagaagagtaatagaaggaaaagtgatggccgtgtcagctctgtatccattgaggatgttcgcaatgctgaagagctacgggctgttgatcaatttcgacaagcattaatcatggaagaactgcttccagaaaaacacgacgactatcacatgatgttgaagtttttgaaagcaagaaagtttgatatcgataaagctaagcacatgtgggcagatatgctccaatggaggaatg

SEQ ID NO: 52042 - DNA, 204 bp, Gossypium hirsutum
  Clone ID: LIB3197-049-Q1-M1-B1
ttccattactggttgcttggttttagttgatggatttgtccaaacatcaaaagagctgccataatgtaatattagatgaaagataaaagcatcagcttctttttctttttcaagcaaattaatgtggttttgggctttgagactatatagctcctcccattaaagcagggatttttgtgtaaataaattactctgcttttgcct

SEQ ID NO: 52043 - DNA, 404 bp, Gossypium hirsutum
  Clone ID: LIB3197-049-Q1-M1-B10
gcagtcttgcattttgttttcccttttttttccccacacctttttttaaacccatttgctaaaaatgcactgggttcttccagtgttgcttgccgttatcggagttactgcactgctcgttgtaactccggtaagtgggtaccgtccatggccgtacttaaaacccaacagctccgacttaatgttcggaggctctaagaaatttgagggctcatcggagtttatccatatgagatatcatatgggtccagtccttactgctaatatcaccatccacccaatctggtacggccggtggcagaaatcccagaagaaaatcatccgtgagttcatcaactcgatctccgccgttgattccaaacacccttcggtggctgggtggtggaagaccgtacagctttaca

SEQ ID NO: 52044 - DNA, 319 bp, Gossypium hirsutum
  Clone ID: LIB3197-049-Q1-M1-B11
cccacgcgtccgcagcatgaaagtgtattggttatattaagagcaaatcttggatgagtatccaaaagttcagtcattatcagcatttacaatcatagtggcatattggaatgcaagctaccactgtaagtctgctcttaaactttcataactgattcttatgaatttctatatttctatctctatcttgtccagcccccttatgttttatgtagcaggaactcaagttgatatcttaactttgatttgttttctctttgaattagtgggaagggaaatttttcttatcaattggtcttttaagatctttcctttcttt

SEQ ID NO: 52045 - DNA, 365 bp, Gossypium hirsutum
  unsure (1)..(365): unsure at all n locations; Clone ID: LIB3197-049-Q1-M1-B12
gctagatgatgcaattctggcatttgtgtacacaaacggataccgattccaaccatccaaatggagaaagactgatgaaatcccttttgatttcatgagaagaagagtatcggttattctggaaacagaatctaatccagaaggcagaaatatccaacccttttacagattcataataaccaaaggagcacttgaagatgtgctcaaagtttgttcttatgtggagaatgtagatatgggtgagataacagctgtctctgcagaacaccattcataggatcctaaatgtggtggaagaaactanaaatgagggattaaggattataggagttgcaataaagaacctgcagcaaacaaaattaagt

SEQ ID NO: 52046 - DNA, 469 bp, Gossypium hirsutum
  Clone ID: LIB3197-049-Q1-M1-B2
agctgatctactttctattcagtagtatatacaaactaaattagcttggcttctctccaacagaaatggctcccgcttccttccatcacgagaaagtttgcgtgatggacgcctccggtcgccttggctctaccctggttgaacgcttgttggaaagaggctacactgtccatgctgctgttcaaggccatgttgatgatttgaaactgaatggggtagctactgaaagggaaaagaagctcaagattttccgggcagaccctttcgattatcagagcattaccgacgccctgaaaggctgctctggtttgttttacgcctttgagcccccacaagaccaccctgcctatgatgaatatatggtagaagtggaggtacgagcagcacataatatggtagaggcatgcgctcggacggagacaatagacaaggtggtcttcacatccttcgccactgctgttctttggag

SEQ ID NO: 52047 - DNA, 427 bp, Gossypium hirsutum
  Clone ID: LIB3197-049-Q1-M1-B3
gttcccgtgggtgaagacatagcgacatttgaactggatctggctgacaaacaatgtgaggttgatggagatacaggctcactttggcatattgctaaagccattcacaagcttgagtctacttttggagttataccaaatgatgcgtgcaaaatgcaaagcatctgatcttggatcatatattatggatcgcatgcacacagaggagcccatgaattcatgtgatatggctatatcagagattaacactctcatcctcatagatagggaggtggatattggtactcctatgagttcacagctgacatatgaagggctacttgatgagttcttgcgcatcaataatgggtctgtggagcttgattcatctataatgggtgttcaacatgatggaaaaaagatgaacgtcccacttaattcaagtgac

SEQ ID NO: 52048 - DNA, 418 bp, Gossypium hirsutum
  Clone ID: LIB3197-049-Q1-M1-B4
gggaaaaagaagcgaaaagaaaggccaaaaaaaaaacaggctgacaatcacagatctaagatcccaaatccaaatgcccctttctcatttcttcatatcaaagtgtaaataacaggcaagatttagaacgatagtaagcaagcaaccatgtcaaggaggcaagctaatcccatgcgccgctttgtcgacagcggaagcttttctctcgctggtgccctacattccaaaccccgatcttctcccattttgccaatcggtcttgtccttgtgggcgctatccttcttattggctatgtatatagtggctcaagcaaattccgaggcgaagcagttagtcggatcggaggcgactattcatgttcagtagaagttcagagggtaataccttttttaaagaaggcatatggtgacagcatgc

SEQ ID NO: 52049 - DNA, 343 bp, Gossypium hirsutum
  Clone ID: LIB3197-049-Q1-M1-B5
ttaataaacgccttctttcttcttcttctccctttctttgctttttcgaatttttcttaagcgagaatgagagagtgcatttcgattcacatcggtcaggccggtatccaggtcggaaacgcctgctgggagctttactgcctcgagcatggaatccagcctgatggtcagatgccaagtgacaaaactgtcggaggaggtgatgatgcttttaacacctttttcagtgaaactggtgctgggaagcacgtccctcgtgccgtctttgtggatcttgaacccactggtattgatgaaaggagaactggtgcttaccggcagcttttccacccagaacaactta

SEQ ID NO: 52050 - DNA, 282 bp, Gossypium hirsutum
  Clone ID: LIB3197-049-Q1-M1-B6
atcccagagggcttctcccacagcagtgatgccataaccaaagaggagattcagagcatctctgagaagatctacagggcagacaccaacaaagcccagaaggaagatatcattctcaatagccaaaactgcatctccccgtcagagaccagagaccaaagggatcgctgcccaaagccactcttcacttatgtcaatgagaagctgttctccaagcccacctatgcagccttcatcaacctcctcaacaactaccagcgggcgacaggtcatggggagcac

SEQ ID NO: 52051 - DNA, 457 bp, Gossypium hirsutum
  Clone ID: LIB3197-049-Q1-M1-B7
ggctttgtgtgcaatagtagttctccgagttcagtaaaggcaaaattttcaggaccattgaaatttggggtggctgaagaaagatgtgttttcagaaatatttataagtagaaagattataggagcatgtcattttcttcaggaattctcttaagattatttaggtgttcctccaatgtaaaactagaagttagattatcttttttctttaggacgtgttgttaaggaaagcattcaaagaacttgcaggagaaaaaagatacttgtgagtgtcaggaataagaaaagcgtaagttatttttatacttccaaggtatgatttgtggcactaacaacatattcagtggaagaaactcctcacaagttataatggtcatgtaatgtctaggttatgttatgtgttgtcactcaattcgatatttatttgcttggatttgtttcattattaagctgtctg

SEQ ID NO: 52052 - DNA, 405 bp, Gossypium hirsutum
  Clone ID: LIB3197-049-Q1-M1-B8
agaaggtgtcttaataaacgccttctttcttcttcttcttattcctttattgctttttagaatttttcttaatcgaaaatgagagagtgcatttcgatccacatcggtcaggccggtatccaggtcggaaacgcttgctgggagctttactgtctcgagcatggaatccagcctgatggtcagatgccaagtgacaaaactgtcggaggaggtgatgatgcttttaacacctttttcagtgaaactggtgctgggaagcacgtccctcgtgccgtcttcgtggatcttgaacccactgttattgatgaagtgagaactggtgcttaccgccagctcttccacccagaacaactcatcagcggcaaggaagacgcatctaacaactttgcccgtggtcactacacc

SEQ ID NO: 52053 - DNA, 458 bp, Gossypium hirsutum
  Clone ID: LIB3197-049-Q1-M1-B9
cggacgcgtgggtggagagccttttttttgtgtagcgattctcagttagtcttttctttaagcttacagcttctctccagagttttataatgggtaaggagaaggttcacatcaaccttgttgtcattggccatgtcgactctggcaagtcgaccactactggtcatttgatctacaagctaggtggtattgacaagcgtgtgattgagaggttcgagaaggaggctgctgaaatgaacaaaaggtcattcaagtatgcttgggtgcttgacaagcttaaggctgagcgtgaacgtggtatcaccattgatattgccctgtggaagtttgagaccaccaaatactattgcaccgttattgatgcacctggacaccgtgactttatcaagaacatgattaccggtacctcacatgctgactgtgctgttctcattattgactcaaccactggtggtttt

SEQ ID NO: 52054 - DNA, 462 bp, Gossypium hirsutum
  unsure (1)..(462): unsure at all n locations; Clone ID: LIB3197-049-Q1-M1-C1
atttttagtaagcgaaaatgagagagtgcatttcagttcacatcggtcaggctggtatccaagtcggaaatgcctgctgggagctttactgccttgaacatggaatccagcctgatggccagatgccaagtgacaagactgtcggaggaggtgatgatgcttttaacacctttttcagtgaaactggtgctggaaagcacgtccctcgtgctgtctttgtggatcttgagcctactgttattgatgaagtgaggactggtacttaccgtcagcttttccaccctgagcaactcatcagcggcaaggaagacgctgccaacaacttcgcccgtggccactacactattggcaaagagatcgttgacttgtgcttggaccgtatcangaagcttgctgataactgtaccggtcttcaaagtttccttggtttcaacgcttgtggtggaggcactggatctggtc

SEQ ID NO: 52055 - DNA, 301 bp, Gossypium hirsutum
  unsure (1)..(301): unsure at all n locations; Clone ID: LIB3197-049-Q1-M1-C10
attggacaaacgctatgttttactggcaaagaactgcctaccactttcagcctcaaaagaattggatgaatgatcctgacggtccgttatatcacaagggatggtaccatcttttctatcaatacaaccctgattcagccatatggggcaacatcacttggggccacgctgtatcaaaggacctcattcactggttctatctcccactcgccatggttcctgatcaatggtacgatatcaatggttgctggacggggtcggccactctccttncagatgggcgaatcgtaatgctttacac

SEQ ID NO: 52056 - DNA, 260 bp, Gossypium hirsutum
  Clone ID: LIB3197-049-Q1-M1-C11
aaaatacccatttttattttcattagcaaaacaataaaaaaatgccgatttctcgcattgcagtaagatctgcagctgaagctggccaagctgatgccctcaaagcagctttagctgagtttatttcaatgctcatttttgtttttgctggtgaaggctcgggcatggcttttaacaagctcactgacaatggctctacaacaccggctggccttgtagcttgatcggtggcccatgctttcgctctttttgggggccgt

SEQ ID NO: 52057 - DNA, 390 bp, Gossypium hirsutum
  unsure (1)..(390): unsure at all n locations; Clone ID: LIB3197-049-Q1-M1-C2
caaggttgcacagttgccattcataatagttagaaaagcacatacataaaagcattgttagcaagctgatgaatgacacatacagcatttaaagcatgtcaattaactattttttggttgcggagacctttctaaggaaatctgtgatcaaataatgatggaaaactgattgaaggcagaggctgaaatgtaagccgacagtttcccatgttgccatttatgtttgaagtttcttttgtgctaataaaagttgctaaatcagggttgactganaaaaaaaaaaaaaaaaaaaaaaaaaaaaaaaaaaaaaaaaaaaaaaaaattntaaaaaataaataaaaaaatggggggccccttttaaagatccaaatttaactaccccttctttcc

SEQ ID NO: 52058 - DNA, 369 bp, Gossypium hirsutum
  Clone ID: LIB3197-049-Q1-M1-C3
gtattattacatttacatgtgatgttacttgcaaaaaagaaaaaactgagagctgcttttccttttcatccatgtttcaagcaaagaacaactctgccatatgtcttaatcaaagtaccttaaacgatgtctcgtcggtgctgtcgccgtcgataataaggtgtctcagcgatatatcggagatggacacggttcatctcagtgtcgatctagtgtcggcggcgagacgaactgttgggttcttgagaagtgttaatgaatgtcagtggcttcatcagagaccaactattattgaagcaataaggaggtatgataaggtatggatgccattgatttctaatctgacggtggtggggtcaacgcctcctt

SEQ ID NO: 52059 - DNA, 308 bp, Gossypium hirsutum
  Clone ID: LIB3197-049-Q1-M1-C4
tgatgaaccacttattctctttttgaaagcaggatgtataacgctatcgccagaatctagctcctctatcctggaaatacactctttcattcgattcacgaggactggcattgccgaaatgttacttgaaattttttctttaagcagctgtatcttctctttcgtccttttctcagtatctaattctctatcttctgaatctataaaaatcaaaatcttagtcaattatcaagagagattattcaatcccgatttcacaaacccctaaaaagtttagggccctacctggattacgctctccggatgat

SEQ ID NO: 52060 - DNA, 93 bp, Gossypium hirsutum
  Clone ID: LIB3197-049-Q1-M1-C5
gtgtatataaagtatagattacaaatatctcgtctctttctggccatgtattgcatacgcattattttaaattaataattttttgcagtgttc

SEQ ID NO: 52061 - DNA, 422 bp, Gossypium hirsutum
  Clone ID: LIB3197-049-Q1-M1-C6
gtcggcgtagaggactatatgggatgcgcttccgctcatggcatcgcgccgtccatcgcgatattcgacaccatacgagatgggcgactggattgcatttgcgtttatccttcgccgttgcattcaagggaacaaatgcaggagctggttgataatatgaagtgcatacttgtggatgcagggaagaatgttgctgatgaaactgagagttaaggagccagtctggtctttgtctgttggctcttcggcttacaagtagtggtggggtggcccaattctcctccctagcttcattttaagtcgagagctgccattgacccttctagaaataagcaagttgggttcttaattggtgctattgttgcttggccttatttgcgcatgcatggtccccaaacttatggtgtggttttttttatgcc

SEQ ID NO: 52062 - DNA, 456 bp, Gossypium hirsutum
  Clone ID: LIB3197-049-Q1-M1-C7
cggacgcgtgggttttccaggaaaaagaaatcaaaaccacaaggtgaagaaggtaaaaaccagcagcggcaaaggcaataaaaggtgaagccaaagagagagagatatatacataataaaaaagattcttcaaaagaacacagctatggctcctcatggagaaggatcagatgcttcagtggaagccatggttgctcaagtcgaaaaacacccaatttcatcaatccttatcatcattgctatgcaaacagaagctttgccggtggtgaataagttccagttgattgaaaaccctcattcttcgtttccaaaaggggtcccttggatccattatcatggtgcatacaaggacatcataatcaatctagtgtggcccggaaaagatttaacctttggggttgatagtgttggcacaatttctgcctctcttgtgacctatgcatctatccaagcatt

SEQ ID NO: 52063 - DNA, 422 bp, Gossypium hirsutum
  Clone ID: LIB3197-049-Q1-M1-C8
tgtagatgctgataatggctccaagaatactgaggaagaaacaatacagtttaaaactatgacagttgagacatgtgaccaagcaataaaaatccatttatcagtacattcagagtctaatgagattgaggatgataaagttcttgatacaccaacctctctggatggtatccaccagttgcacaagaagttgctattgctcgaaaaaagagaaccgggaacggaagattcattggatggaagtgtttttagtgacattgagtgtggtgatggactactgactgttgagaagttgaaatcagcattaaaagctgaaaggaaggctttaaatgatttgtataccgaactcgaggaagagaggagtgcttctgctgtagcagcacaccagacgatggcaatgataaataggcttcaagaagaaa

SEQ ID NO: 52064 - DNA, 394 bp, Gossypium hirsutum
  Clone ID: LIB3197-049-Q1-M1-C9
ataataataacaataattctctttctgtttctctggtttaaacatgggtatgggtttaaggaatggatttcttttgattttatcttgtgttgttacactttccctctcagttttggggcgacctgccactttccttgaagattttagaatcacttggtctgattctcatattaggcaaatcgatggagggagagccatccaacttgttctcgaccaaaattcaggctgtggatttgcttctaaaaggcagtatttgttcggacgtgtcagcatgaaaatcaagctcatccccggcgactccgccggaacagtcaccgccttttatatgaattctgttacagatgctgtgcgagatgagctagacttcgagttcttgggaaaccgtaccgggcag

SEQ ID NO: 52065 - DNA, 393 bp, Gossypium hirsutum
  Clone ID: LIB3197-049-Q1-M1-D1
ctcgtgtcttgtctctcacagtctgttatagtaaaagaaagaggcaccaaaaaaaaaaaacatgggaagatccatttcctgtttcaaaatcatcacttgcggcactgattcagctgataaaaacgaagactttatcgatgttcctcaggacaagagatcgagtgacaaaaaaggatggagtttccgtaagagatctgaacggcatcgggtgcttagcaacactgtggtacaagaagcttctactggactggaggaaagtcctgaagctgctagttatgttcaacagtccgatgtctccgttgctcctgagaaaacctccactgttcagtacaccgaatagaaacttcagccagtagcaccaaaagaatacgttgaagaaaaatctcaattatc

SEQ ID NO: 52066 - DNA, 372 bp, Gossypium hirsutum
  unsure (1)..(372): unsure at all n locations; Clone ID: LIB3197-049-Q1-M1-D10
cccacgcgtccgagaaaaatggcgcagattccatcgtggtggagatcggttcagcccctgagcgtgaggtttttagcactgggaaatgagacagggaatttaggactatactcttactcacctaaaaaacaaagttttgaagcttcatttcaagttctcaactccaaatgtgactttcctttagcttgtaaaccttatgggatatgtacattctccaatgcttgctcttgcattcggctcgcaactaaggaaaaacacatggtttctaattgcagcgagggaacatcaagttcagcacagttttgcaatggtactcaagtggagatgctngaattaaatggtgtcaatactgtactaaaaaatgctttcaca

SEQ ID NO: 52067 - DNA, 384 bp, Gossypium hirsutum
  Clone ID: LIB3197-049-Q1-M1-D11
cggacgcgtgggcacaattgaaaatgttgaagagctgcagaagaaaaacccttctgtttgcataaacggaggtgaaactgtaaatgctggggtagaggtagctaattcggaagttgaatatattgagtctgagaacttgggtgatctagaagatgttaatacctgtcttgagaagctcttacctggacttgaatccaaagattgggttctggttgttgaaactctcaacaatgttcgccgattatcaatattccatagggaagcaatgcatagtatgctgggtgatttgatcccacttgtagtcaaatccttgaagaatccaagaagtgctgtttggtaaacttgcaatatgacattcgcagacatcttcagtgcatataatga

SEQ ID NO: 52068 - DNA, 368 bp, Gossypium hirsutum
  unsure (1)..(368): unsure at all n locations; Clone ID: LIB3197-049-Q1-M1-D12
ctccctgtctcactacattgctctgattcttgttcacgtcaagcttggcattttctgtttttctcaatggcaatggatgcttcactgactatgtgcaaatcggtcacatcacctcctggcttattcttggggagaagtagagttattaggagttcccagtgtacctttatggtgggaagcaggatcaactttcctaggcagaaagctcagtcaacccaagttaaatgtaaatctagcaggtgtggagtagctcttggtgctaaatgccgtgctgagaaaattttggtggcaaatagaggagaaatttgctgtcgtgttatccgaacagctcatgagatgggaataccatgtgttgctgnntactctac

SEQ ID NO: 52069 - DNA, 359 bp, Gossypium hirsutum
  Clone ID: LIB3197-049-Q1-M1-D2
gtttccaaagaaacatattgggtttccttttcttgatattggcttcactaacaagcctctcttctagccttcctagtgaatactccatagtggaacatgagattgacgcatttctttcggaggaaagggtgttggagatcttccaacagtggaaagaaaagcatcggaaagtgtaccggcacgccgaggaggctgagaaaaggtttgaaaatttcaaggggaatttgaagtatatcctagagaggaatgcaaagagaaaagcaaacaaatgggaacatcatgtgggattgaacaagtttgctgatatgagcaatgaggagttcagaaaagcttacttgtcaaaggtgaaaaagcccatc

SEQ ID NO: 52070 - DNA, 308 bp, Gossypium hirsutum
  Clone ID: LIB3197-049-Q1-M1-D3
cactcacccaaactagaacattcaactcggtaactcactcacctccccaaaaaacccccactcccatcatcacctttaactcgtgttccactcacgggtctactcaatctctacttaatacaaaaaaccctactcctttgggctaaatcacaagactcacaaggaaaccagttgggtgaatttaatggcgacaaacacatcctctttaaagaagaaaagtgagcaagtcctagacggttcggatataatggagttggttgaaaaccaagaggtgttcactagtttcgtcgaccataagttcaaagagc

SEQ ID NO: 52071 - DNA, 298 bp, Gossypium hirsutum
  Clone ID: LIB3197-049-Q1-M1-D4
gttggcattttccagagcttactaagatcatacaagacaatatcatgtatgccaaggcagtaaaactaatgggtgaccgtgctaatgctgctaagctcgacttctcagaggtattaccagaagaggttgagactgaattaaaggaggcagcagtcatatccatggggactgaaattagtgaccttgatctgatgaatatcaaagatttatgtgatcaggttctcaatctttctgaataccgagctcagctatatgattatttaaagagcaggatgaacactgttgcaccaaacttgac

SEQ ID NO: 52072 - DNA, 416 bp, Gossypium hirsutum
  Clone ID: LIB3197-049-Q1-M1-D5
cattttctttgtttctccgtctgcttatccacggccgagaataaatgaaaaaaatgagctccgatgatccgaaccaacccggtctcgtgataactgtgaccgaatccattcgctcgtttcttctctcagcctccaatgaccatcgtctctctaaagaactccgagaactcgctctcactctttcctcagcagccaatgctccgtacaagcagatccgaagcatatggatggaatcagcttttgactccaggcccggattgattcctctcttctccggatctaatttcgttttcaccagtcctaaacccagagagaagagcgaagaattgaaggagaggttaaggaagcttaaagaactagcagagaggaaagagtatcaagagcttgttaaagatatcacgccgaagaaggatctc

SEQ ID NO: 52073 - DNA, 432 bp, Gossypium hirsutum
  Clone ID: LIB3197-049-Q1-M1-D6
attcctgcaaattcccttcttttcccctccacccaagcctaaaaaatcatggcgacagctcaaatcagcaaaaagcgaaagttcgtcgctgatggagttttcttcgcggaactcaacgaggtattgaccagggaactggctgaggatggatactctggagtcgaagtcagagttactcctatgcgtacggagatcatcatcagagccacccgcacccaaaacgttctcggtgagaaaggtaggaggattagggagcttacctcagtggttcagaagcgattcaagttcccagaaaacagcgtcgagctttacgctgagaaggtcaacaacagaggtctttgcgctattgctcaagccgagtctcttcgctacaagctactcggaggtcttgccgttcgcagggcctgctatggtgtattgagattcatcatg

SEQ ID NO: 52074 - DNA, 414 bp, Gossypium hirsutum
  Clone ID: LIB3197-049-Q1-M1-D7
ggaaggtttccggtgctggtcgacagctggaattgaacaccgcaacagggacctcactctgctttggccaacttttattagccacgtccccataaccaaaacctcatcttcagctttaggattggtagcggtcgattcattaaagaaaaaaaaacgaatatttctttgttttgcagttggtcacgtgcttgtcagatataaatgttaaagagtttaaattataatatttagatgactataaaatgttgattttttgatctccactaataatatatcacgtcatttattttaaaaaatttcctaattaatgccatgtactccaactctaattattctaataatatcggtaaagcaagattatggttcaaagttttttaatgcacaagtttttaagtttagtgcttaacgttaatg

SEQ ID NO: 52075 - DNA, 372 bp, Gossypium hirsutum
  Clone ID: LIB3197-049-Q1-M1-D8
gaagaaagaaaaatcagaaacaattactactagtattattagcttgatatgatatatttacgtttccagcttttgaccatccgttctaacaatagcaaaagaatctccaacccaaacacgacatgtgtcgtggaagctcatagtttgctgtctctgcagttttcccattgaaaacgagggattacgcccccaggcccaaagccaaattctcacctttctttctctaatatagtttttttcctgtagaaaaacacaagccaatatctttgcaaaaggaagatagtaatacgggacatgaagagttgtgcgtgtttttaccgcccagtgattgtggccaaatccatcgaccagaaagacatgagctttgtatcg

SEQ ID NO: 52076 - DNA, 381 bp, Gossypium hirsutum
  Clone ID: LIB3197-049-Q1-M1-D9
cttcttcccttccattttactttgttttagttgccataacgtcaccttccaatacaacccacaatgaggcaacaatatgtcttcactactctcacgttgctcatcctgttttccctcagttgttcaacaacattagcccaagctccggcactggctccagcaccttctggtccgacaaacgtcaccaagatcctcgaaaaagccggtcaattcaccctcttcattcgtcttctaaagtccactcaagtggccaaccagctgctcggtcagctcaacaattccaacaatggtatgaccgtttttgcaccaacggacaatgctttctccagccttaaatcgggcacattgaattcactcaccgatgaacaaaaagtggagctg

SEQ ID NO: 52077 - DNA, 453 bp, Gossypium hirsutum
  Clone ID: LIB3197-049-Q1-M1-E1
cccacgcgtccgaaaacaagcaaacaaaggtaaaatggcatggacaatggcaatggcgatcccttcacttcctcttctcttcctctttacatttctgcttctactcccacttctcatttcctcttcccctgttcaagaccctgagcttgttgtccaagatgttcacagtgctatcaatgcgtccaggaggaacctattgtttctctcctgttgtaccggaaaccccattgatgactgctggagatgtgacccctactgtgagacttatctgccgaagctttctttttgttcaattttttttccaagtcttcttttagttaattttttgttcaaatttattttttaataatttttttttttataactttttttacatttaattttttcttttccgtcttttttttatatattaaattttttttggaacattttttgtttttctttcttcttttt

SEQ ID NO: 52078 - DNA, 321 bp, Gossypium hirsutum
  Clone ID: LIB3197-049-Q1-M1-E10
gaatgatattcccatttgcagaatttatggatagatatcaggggcagacccagttgttcaagtggaagcaaagtgattttcagatggctctggaggaggcagttttggcagaaaatggtttcctagactcggaacataagacccaacaaatgggatacacagatactcaacccagttgttcaagtcaggatctggattgtttatacacccacaaccaggatgcaagaccttgtgacagctgtggctcggttgttccattaaaaactatgaagaaaatgaagaaatctgctgagcttttgtgcaaacattgttataagctgc

SEQ ID NO: 52079 - DNA, 342 bp, Gossypium hirsutum
  Clone ID: LIB3197-049-Q1-M1-E11
cggagagcagtccctaggaacaattaaaaagaaccgaaaaaaaaaacacagattaagacagaagcatggccagccagctcgtaggaacaaagagagcttgtgtcgtgggtggcagcggattcgttgcctcattgctggtcaagttgttgctcgagaagggttacgccgttaacactacagtcagggaccctgacaaccagaagaagatctctcaccttgtaacactacaagagttgggagacttgaagatctttcaggcggatttaactgatgaagggagctttgattgccctattgctggttgtgaccttgtcttccatgttgcgacaacccgtaaacttt

SEQ ID NO: 52080 - DNA, 358 bp, Gossypium hirsutum
  unsure (1)..(358): unsure at all n locations; Clone ID: LIB3197-049-Q1-M1-E12
aacgtgttacagcccctattattaggtacttggattgaactggttgttctgaatgcttttcctatccgcatctctgaggttcgttgtatcgaattgaagtcgatttgccaaagctatggtacaaaattggcggtctactttgattgatggtgaactactttagtatgtttcttctgtgttgtctgatgatgtagacatgttttgagtaatgttgagctgccctttgtgctttttcctcaagaaacttcttgttggtacttgtttcttaagaattgaatcatcagccttttagacttatgtttaaaaccacaagtacaatttaggatgcatantgggttcaatttgaaattattttttt

SEQ ID NO: 52081 - DNA, 237 bp, Gossypium hirsutum
  Clone ID: LIB3197-049-Q1-M1-E3
aatacggacatcatggtgaggaatgtgaactgagggttgcttacatagcacctactcgacctacttcacctgctaaagaatgatccatagtaggctcttcaccttgggcttgcgcctcagacaatggtctctacaacactgcagatttggcatctaaaatggctctcatttcctagctgtatgaagagaaaaacgcctcccttctggagaataacatgctccagcatgaactggaac

SEQ ID NO: 52082 - DNA, 369 bp, Gossypium hirsutum
  Clone ID: LIB3197-049-Q1-M1-E4
atttggtagtgttcatgaaaagcttcccgagacagggagcacgcgtagtatgctttttccgaattttggaagcatgtttagtacagcagagcctcatgctagaaatgaacaatgggatgaggagagcttgcagagagaaggtgaggactatgcatcagatgctgcaggaggagactcggatgacaatttgcatagcccattaatctcacgtcaaacaacaagcttggaaaaggacatggttcccccagcttcccatatcagttctctaagcatgagacgccatagcactcttgtgcaagatgttacagaatcagttggtggtacagggattggaggtggttggcaagttgcattgaaatggtctgagcg

SEQ ID NO: 52083 - DNA, 308 bp, Gossypium hirsutum
  unsure (1)..(308): unsure at all n locations; Clone ID: LIB3197-049-Q1-M1-E5
ccgctctgtttctatctcggctctgacgagaagccggcgccgacatggttcacgtcagcttctaccgcaattatgggaagacctttaagaagcctaggcgtccatatgaaaaggaacgattggatgcagagttgagacttgtaggagagtatggactccgatgtaagagggagttgtggagagttcagtatgctttgagccgtatccgtaatgctgctagggatcttctcactcttgatgagaagaaccctcggcgtatttttgaaagtgaagcacttcttcgtaggatgaatangtatgggactttg

SEQ ID NO: 52084 - DNA, 339 bp, Gossypium hirsutum
  unsure (1)..(339): unsure at all n locations; Clone ID: LIB3197-049-Q1-M1-E6
gttaaaaacgttgctgttaaggatcttaaacgtggttttgttgcttcaaactccaaggatgatccggccaaggaagctgccaacttcacctctcaggttatcatcatgaaccaccctggccaaattggaaatggttatgccccagtcctcgactgccacacctctcacattgctgtcaaattttccgaactgttgaccaagattgacagacgatctggcaaggaactcgagaaggaacccaagttcttgaagaacggtgatgcangtatggtaaagatgattcccaccaaacccatgggtggtgagactttctcttgatacccaccacttggacgtttt

SEQ ID NO: 52085 - DNA, 210 bp, Gossypium hirsutum
  Clone ID: LIB3197-049-Q1-M1-E7
gttaaaaacgttgctgttaaggatcttaaacgtggttttgttgcttcaaactccaaggatgatccggccaaggtagctgccaacttcacctctcaagttatcatcatgaaccaccctggccaaattggaaatggttatgccccagtcctcgactgccacacctttcacattgctgtcaaattttccgtactgttgaccaagattgacaga

SEQ ID NO: 52086 - DNA, 392 bp, Gossypium hirsutum
  Clone ID: LIB3197-049-Q1-M1-E8
aatcttgaagggtgttacggagagctgttcaaacaatacatgggctcatttcattgtggagacttctagtggctttcacagactggatattttctggcctttgatgaaccttttacagcgtcaaagaaaccctgtttcaagcaagagtgaacgatgaaaacctattaatctgtgtactgtaggaatgttgcaagcgattgtatcagtcaaaccatgctccttgcgtgcatgcaagcaagggtacgagttgaatatttgtgcgacgtggctgttggcttggtggataatcaacccaagcccttgtcaaagcttaagttgatctctagaatttgaataattatggttgtttaacgaatctactccaatttctccccttttgggttttttttttg

SEQ ID NO: 52087 - DNA, 267 bp, Gossypium hirsutum
  Clone ID: LIB3197-049-Q1-M1-E9
cttgggtttcctgtttcactacccaatcccgatcaactgtacgagaagtgccgcgatgcagtgtttaaatgtgggaatatctccattggatatcctttctctggaggtgatcgagatccagaatgcggacatcctggtttggcgcttcactgtgacgtttttactaataccactaagattgaaatttttcgtgtaaagtatgaggtgctggacatccatcatgaaaatcaaattctaaggattgcgagggaggacttcatcaagaat

SEQ ID NO: 52088 - DNA, 313 bp, Gossypium hirsutum
  Clone ID: LIB3197-049-Q1-M1-F1
aaataatacacaagtcattttgaagctttcgcttgaaaattcccaatagctttaccagtacaaagtcagatctgtggagaatttttgtttctgcttggtttaatcggtcgtttggtttaaggatataaactttagtaaatacatcaaaatgagccatcctcaagaaccacaacgctctttcttccattttggaaatcctttccgttcaccaaagggttctcatttgccttctgggactctttctttattgggataagttgagaaaaccttgtcagagaggctgcagaaacttgtgcctaaagacaagagtgac

SEQ ID NO: 52089 - DNA, 273 bp, Gossypium hirsutum
  Clone ID: LIB3197-049-Q1-M1-F10
cgctgagtttaagcatatcaataagcggaggaaaagaaacttaccaggattcccctagtaacggcgagcgaaccgggaaaagcccagcttgagaatcggtcgccatcggcgtccgaattgtagtctggagaagcgtcctcagcgacggaccgggcccaagtcccctggaaaggggcgccggagagggtgagagccccgtcgtgcccggaccctgtcgcaccaagaggcgctgtctacgagtcgggttgtttgggaatgcagccctaatcgggc

SEQ ID NO: 52090 - DNA, 225 bp, Gossypium hirsutum
  Clone ID: LIB3197-049-Q1-M1-F11
gaagaggggaaaggttccatgtgaacggcacttgcacatgggttagtcgatcctaagagacgggggaagcccgtccgacagcgcgtccagcgcgagcttcgaaagggaatcgggttaaaattcctgaaccgggacgcggcggctgacggcaacgttagggagtccggagacgtccgcgggggcctcgggaagagttatcttttctgtttaacggcctgcccaccc

SEQ ID NO: 52091 - DNA, 416 bp, Gossypium hirsutum
  unsure (1)..(416): unsure at all n locations; Clone ID: LIB3197-049-Q1-M1-F12
cggacgcgtggggccaaaaacgggggcaaattgaagaatgggtgttgattattacaagattcttcaggtcgaccgcaatgcaaaagatgaagatttgaagaaagcgtatcgtaaactagccatgaagtggcatcctgataagaaccctaacaacaagaaagatgctgaagcgaaatttaagcaaatctctgaagcttatgatgttctgagtgatccccaaaaacgggcggtttatgatcaatacggagaagaagggttaaaaggccagatgccgcctccaggggcgggaggttttggaggcggtgacagtggtggtccaacgacgttccggttcaatactcgcaaccctgacgatattttctcggagtttttagagtttcgagntcgttgggatgggtgatatgggtgggccacgt

SEQ ID NO: 52092 - DNA, 404 bp, Gossypium hirsutum
  unsure (1)..(404): unsure at all n locations; Clone ID: LIB3197-049-Q1-M1-F4
cggacgcgtgggctcgttaatctgatcggttattgtgccgatggggatcaacggcttcttgtatatgaattcatgccattgggatccttggaagatcatcttcatgatcttccacctggtaaggaaccgttggactggaacacgagaatgaagatagcagccggtgcagccaagggtttggagtacctccatgataaagcaaaccctcctgttatttacagggacttcaagtcctccaacatattactggaagaaggatttcacccgaagttatccgattttgggctcgcgaaacttggtcccgttggagataaatcgcatgtttccacccaggttatgggcacatatgggtattgtgctnctgagtatgccatgactggtccattgacggtgaaatctgatgt

SEQ ID NO: 52093 - DNA, 439 bp, Gossypium hirsutum
  unsure (1)..(439): unsure at all n locations; Clone ID: LIB3197-049-Q1-M1-F5
cggacgcgtgggatactaggtacttggagaatggaaagtactactatgacgtcaagagtgagaacagctattatccaaaccagctcgacaactcaagaggagttgcttccaggaacgagttcgatgagaatcgttacaacaacatgggaaggtaccaccagaaccaagaggagttcgaggaaagcgaggaagagttcgaaccctgatcacctgtcgtacagtatttctacatttgatgtgtgatttgtgaagaacatcaaacaaaacaagcactggctntaatatgatgataagtattatggtaattaattaattggccaaaaccacaatgaagctaaattttattattgagcctgcggtacttttttggatgatctttttatttctattaattataagttcctcgctttgaatgctaaaggttgagagagtattgtct

SEQ ID NO: 52094 - DNA, 278 bp, Gossypium hirsutum
  Clone ID: LIB3197-049-Q1-M1-G10
ttccaatctttcattctttgctgatgaagtagtaatatctatagcatacagagatggagaggcaaataagcaagcaggtttgtttgttgatgtgggttttggttgctgcctttttctcccacaatagggtcattgcagtgacctccactggcctgggtgagcagaaaaacaactattcagcttctgaccctcatgctggaacttctccttcaggttcacatgggacaccaccattttcaagaggttgatcacctgctcttttattgaccccgttacat

SEQ ID NO: 52095 - DNA, 468 bp, Gossypium hirsutum
  Clone ID: LIB3197-049-Q1-M1-G11
gaaaaagttgaaaaattggaaaagggttgttgttttttctttcttcttttctttgagcaaagctttctttctttcactttttgtttaaattgctttggtattattatataaatcacttcacattttccaaggatttgcagtctcctaagtttattttgggctctagaacaactgtcaacaacaagcaaatgccaatcacattccattgtgcaaagaagtgaacctttttcatacagaagaacaaaactggaaatccccaactttcgtttccattttttgtgcttcatttcacttccaagatgcttcctttcacctgcattctcttcatgtgcatcttggcttcagtttcaagagctaccttcaatcttagtctccctcatcaacaccctcaccctgaatccggtgttcttgatgttcaatggagcttaaatgcatctttatctagaagacaaacattgtctgaaacac

SEQ ID NO: 52096 - DNA, 370 bp, Gossypium hirsutum
  unsure (1)..(370): unsure at all n locations; Clone ID: LIB3197-049-Q1-M1-G12
gcaagctaacgcttcggcagcgaaggcagagggcattccaaaatgaagctttgtacatgacaggagaacaaactcttcactgtttctggctactatcccagaggccgattgttcattacactcgtcaaacgctccatcaaaatttatttttattaactgcccaggtgggggtttccactttttaacttccttgacgatattaggcttccagttcttctaaatagctaagaacaaagcttgcaatctcctgacccgatctttttgttttgtcatgtacacgagtatttctgtctccccagatggcccataacgcgcagcanaacagtttgcagagaggttgagggtggagaacaagagtcatggacaatga

SEQ ID NO: 52097 - DNA, 269 bp, Gossypium hirsutum
  Clone ID: LIB3197-049-Q1-M1-G2
gaacaacagagtttgtgtctggagggtgtgccctggaattgtcttatggtcctcaggttggccaatgggactgtaaagaccgccttagatttcttgaagaagagtacttttttcgatgttggtgctgtggttgttcagaagtgaatgaatctgatcttgtaattagtggattttgttgtgttaatccaaattgctctggagtggttttagacaatcttgtggctaactgtgaaaagcagaagcctaatgttccagaaacaataagcaac

SEQ ID NO: 52098 - DNA, 232 bp, Gossypium hirsutum
  Clone ID: LIB3197-049-Q1-M1-G3
gtttcaagtttcaagtttctcctctacgtaatccatggaagcctgcttcttcgacactctcaaggctcaacctttctgggttattgtccttttcactttgggttctttatcactcttgaagttctcatttgtttttctgaaatgggtctggatcaattttcttagacctggtaagaatctcaaaaaatatggctcctggggtcttggtactggaccaactgatggtatcggc

SEQ ID NO: 52099 - DNA, 348 bp, Gossypium hirsutum
  Clone ID: LIB3197-049-Q1-M1-G4
aaaataaaaaatattcttttcagtttatccctctttctctttcaattttcttcgaaaataaacaaatgggtctttttggtttgcttagttccatcaactgggactctgagttttacccacagctcactgatttcgtttacctccctttctttgctcttttcttcctttttgtcaggcttttcctagacaaatttatctttgagaatttagctaggagactggtccttggtaaaggccacaccttacatgatgttcagaagcatgataacaggaagaaactcaataaattcaaagagtcagcatggaaatgtatctattttttttcctcagagttattatctatatatg

SEQ ID NO: 52100 - DNA, 447 bp, Gossypium hirsutum
  unsure (1)..(447): unsure at all n locations; Clone ID: LIB3197-049-Q1-M1-G5
agatagttgaattctgtatccatgtgaaaactcctgctgaaaagatcggtctcatgaagcagaggataatgagctacattgagcacaagagtgaccactggtatcaagatacgatgattatattcaaggagcttgaagagttgaatcgagtaaggatagcaatatgggtgacacatagaatgaaccaccaagacatgggagagaggtatataagaagggctctcttgatcgaagagctagttaagattttcaacgatttggatattaaataccgtctgtaccctatcaacatcaacgtctgtagcatgccccccgcaacatcggaccgacttcctncgaattggagtggacctgccagcttgacaaagtcnttttggtattgggatatggttaggctacagggagaggatgtttcaantagatgattagatgccaattagtatatat

SEQ ID NO: 52101 - DNA, 331 bp, Gossypium hirsutum
  Clone ID: LIB3197-049-Q1-M1-G6
cggacgcgtgggggaaaatttccattttagcagactatcttcgccgccttctcttcctcctatctcatagcagccatgatcattccagagaagaaccgccgcgagatctccaagtacctctttcaagagggtgtttgctatgcaaagaaagattacaacttggcgaagcacccagaaattgatgttcccaatcttcaagtaataaagctgatgcaaagcttcaagtcaaaagaatacgtgcgtgaaacttttgcatggatgcattattactggtaccttaccaatgatggcattgagttccttaggacatatctgaatcttccttctgaga

SEQ ID NO: 52102 - DNA, 239 bp, Gossypium hirsutum
  Clone ID: LIB3197-049-Q1-M1-G7
cttcaatgtgcaccttcttagtgttctttcacactcccaagctaatgcttcaactactttcttcctcatctaccttcatttcctcaatggccaattaattttatttcattttccttttttttattctcaaacagctcaagtccaagtttaaagggctttatttcctggtttttgattgaaagagttttgctttgctttggtgaaaatgtttagcttttctcgtatacgcatgaaacttg

SEQ ID NO: 52103 - DNA, 275 bp, Gossypium hirsutum
  Clone ID: LIB3197-049-Q1-M1-G8
aagaggaagaggcattctttcactcccaaaatgtcagatcttcaagcaccccttcgcccaaagaggaagaagggcttggtggactttttggtccagtttcgttgggtttttgttatattttttgtccttcctttttcggctctgtattactttctcatatatcttggagatgtcagatccgagatgaagtcctacaagcagcgtcagaaggaacatgatgaaaatgttaagaaagtagtgaagcgtctcatacagaggaatcccaaaaaaggatg

SEQ ID NO: 52104 - DNA, 276 bp, Gossypium hirsutum
  Clone ID: LIB3197-049-Q1-M1-G9
attgttatctctgaaggtgtcttaataaacgccttcgatttaccttcgatttccatttacttctctattgctacgtttttgaatttttagtgagcgaaaatgagagagtgcatttcagtccacatcggtcaggctggtattcaagtcggaaatgcctgctgggaactttactgccttgaacatggaatccagcctgatggccagatgccaagtgacaagactgtcggaggaggtgatgatgcttttaaacaccttttcagtgaaactggtgctgga

SEQ ID NO: 52105 - DNA, 133 bp, Gossypium hirsutum
  Clone ID: LIB3197-049-Q1-M1-H1
cggacgcgtgggttgagttcttattaacggaatcatgcctgcggagatggtgataatgccccaatatccctagatcatctacattatggagatggcggttgcgctttcgacttacgttaagctgactttggat

SEQ ID NO: 52106 - DNA, 368 bp, Gossypium hirsutum
  Clone ID: LIB3197-049-Q1-M1-H10
gcccactatctgtctctctctctctctctttcacttcacttccacagccttctcttctccaccaatccaaaaaaacaaagatgcagtacaaaaacctgggcagatcaggcttaaaggtgagtcaactatcgtatggagcatgggttagtttcggtaaccagctcgatgttaaagaagcaaagtcacttctccagtgttgtaaagacaacggagtcaactttttcgacaacgccgaggtttatgccaatggtcgagccgaggagatcatgggtcaggctattagggaacttgggtggaaacgatcggatatcgtggtttctaccaagatcttttggggctgtcctgggccaaatgataaggtttgtcta

SEQ ID NO: 52107 - DNA, 318 bp, Gossypium hirsutum
  Clone ID: LIB3197-049-Q1-M1-H11
aaaacatgtaaaattaagactaaccatttgaatcaaaccaattgaagttaaaaatacatattttggcgaagatcagcaaattgcgtcccaaaagattgaagaaccgttgaaacccccgtccagatatatataattccctgcattcaaaggaaaataaatagaaggggagaagaacattctattgagattctttcttttcttttcttttcttttaacgatgaacgctcaccatgcttccctatgtcgacggacgctggaggagattcgtcaaaagagagccggcgaaagaatcagcaaagcttcttgcggatcggatct

SEQ ID NO: 52108 - DNA, 451 bp, Gossypium hirsutum
  unsure (1)..(451): unsure at all n locations; Clone ID: LIB3197-049-Q1-M1-H12
cggacgcgtgggttccggaccgaaagcgtcgctgctcttttttctggcgtctctgctaccgtcctccgccagaccctctattccaccacccgcatgggactctacgacatcctgaaacagaagtggactgataaagagaccaaaaccatgcctctctcgcggaaaatcaccgccgggctaatcgccggagggatcggcgctgccgttgggaacccagccgacgtggcgatggtgcgaatgcaagctgacggacgccttcccgtatctcaacgtcgtaactataccagcgttgtcgacgccatcacacgcatgaccaaacaagaaggcgttgacctccttgtgcgcggctcgtcgctgacggtgaatcgtgcgatgttggtgacggcatcgcagctggcctnctacgatcagatcaaagagatgattttggaaacgggctgatgaaagatgg

SEQ ID NO: 52109 - DNA, 105 bp, Gossypium hirsutum
  Clone ID: LIB3197-049-Q1-M1-H2
cggacgcgtgggaaaaaaaaataaaaacaaaataaagaaaaaaaaaaataaaaaaaataaaaaaaatatcaataaataaaaataaaataattaatatggggcggc

SEQ ID NO: 52110 - DNA, 328 bp, Gossypium hirsutum
  Clone ID: LIB3197-049-Q1-M1-H3
cgccggccacgcgttcgtccacgcgttcgggggaaaggttccatgtgaacggcacttgcacatgggttagtcgatcctaagagacgggggaagcccgtccgacagcgcgtccagcgcgagcttcgaaagggaatcgggttaaaattcctgaaccgggacgcggcggctgacggcaacgttagggagtccggagacgtcggcgggggcctcgggaagagttatcttttctgtttaacggcctgcccaccctggaaacggctcatccggaggtagggtccaacggtcggaagagcaccgcacgtcgcgtggtgttcggtgcgcccccggc

SEQ ID NO: 52111 - DNA, 347 bp, Gossypium hirsutum
  unsure (1)..(347): unsure at all n locations; Clone ID: LIB3197-049-Q1-M1-H4
cccacgcgtccgtttttttcttaatcaaatctggttcagttcgcataatagtaacgcataaaagtatggttgggaggattttattactagttctttttatgaatgctgcctttttaatagtgaatgctgtaccagaaacatgccctgctgatctcggtggaaaatgtggtgaagatagtgaatgggaaggggaatttttccctggagttactaaaattaagtatgagggtccttctagcaagaatccactttcatacaaatggtacaatgcagaagaagtgattcttgggaagaaaatgaaggactggttgagatttagtgttgcattntggcatacatttcgtgga

SEQ ID NO: 52112 - DNA, 309 bp, Gossypium hirsutum
  Clone ID: LIB3197-049-Q1-M1-H5
gctcttgccactttcatttcttttatatatatacaagtaatcatcttttcttttgcaaacccagaattgaaatttcttcatctcttttttttttttgggggggggtcttgcaaaggcttttctccaagttaaatggacgagtcttggcgaatgtgcatgggaatgtcaactactcatcatcttcctcgacggaaatctatggaaaattccattttttcgttgaaccatgtcactatggtggtgccagatcataatcttgacgtggatgacttttccgatgtcttcggcggtcctccgcggagtgtgctt

SEQ ID NO: 52113 - DNA, 309 bp, Gossypium hirsutum
  Clone ID: LIB3197-049-Q1-M1-H6
gtagtcgccactcgccaccaggaaggggaaaattcccttgtaaaacactttgctttcgatctgagaatttgccaagagaaatcaaatcctatatcttcaatttctgatagaaaattcacgccacgaggcataggttattgaaaaatctgcaagtacttgaatttgtgtgaaggaaagatgcaaaatcaggatggagcggtagctgatagggaaaaggaatctgctgtatccattcccatttctgaagttgatgactgggcaaatttcgcagatgatgatatcatgcagcaacaatctgccattcatgct

SEQ ID NO: 52114 - DNA, 387 bp, Gossypium hirsutum
  Clone ID: LIB3197-049-Q1-M1-H7
attgagtgtgattccattgcgttggaagacgatagggtagaattcactcactcatcactgatgccagctactgatacaacttcaagacatattaccattgtatcttcacatgagaaaataacacatcctccagaccagtttgtaccggatataggtttggaaggtggggcatatcagcaccctgaacaaaattccaggagagaggagaggaatcttcctaatatatctgtgcccctgccagttaagagagaggagcatataccaagcaaggtagtggaagatcttttaatggaagtagaacaacagtttccaaccaaggtagaggagcagcctcaacatggtttggcagtttcagagggagaatcttcgcagatatcaaatgacatt

SEQ ID NO: 52115 - DNA, 335 bp, Gossypium hirsutum
  Clone ID: LIB3197-049-Q1-M1-H8
cccacgcgtccgcccacgcgtccgggggaaaggttccatgtgaacggcacttgcacatgggttagtcgatcctaagagacgggggaagcccgtccgacagcgcgtccagcgcgagcttcgaaagggaatcgggttaaaattcctgaaccgggacgcggcggctgacggcaacgttagggagtccggagacgtcggcgggggcctcgggaagagttatcttttcttgttaacggccttgccaccctggaaacggctcatccggaagtagggtccaacggtcggaagatcaccgcacgtcgcgtggtgtccggtgcgcccccggcggcccttgaaaa

SEQ ID NO: 52116 - DNA, 372 bp, Gossypium hirsutum
  Clone ID: LIB3197-049-Q1-M1-H9
agctttttaaaaccctaatttcacccttgtcttttagtttctccccattttctctctcaaaatcctaaaagaaaagaccaaccagattatattgtattcaaaacagagaaaaaagaatcaattgctcatcaaccactctctcataaaaagcgttttctattttccatttacttttttttattttgtttttccttctaatttttccttgttttcgatataaaactagggtttgcgctaatggtgggttttgtctgttgaaattagggtatttttggttttcgattcttctgtaagggaagtgtggttgtagtggcttcccaaatatataagcctggtttgaagggtgaagttgggttggaaaagatggcatca

SEQ ID NO: 52117 - DNA, 409 bp, Gossypium hirsutum
  unsure (1)..(409): unsure at all n locations; Clone ID: LIB3197-050-Q1-M1-A1
gtccgatgatgacccctcgatcaacttgatatggtcagaggcatttctccatgacttgtcggagaacttccatggcactgattcttggtggaaagaatatagtgaaattgggacatcttcaaaggaggagacctgtttttcatggttggtgggggatgctggtgacgatgatgggaacttgggatttagtggtttcagtgaaatattagggatgaatttgccttgacatgggtggcaagttttagcatgcaccaattagggactgccctgcctttgtgcacgcatgtgaacaatgaaaagaggcattatgtgttcgttaatagacctcattaagctntatgtctagattaattatttatgattacaggggatcaataaaagtgaaaagacttaagaaagctttcatgtc

SEQ ID NO: 52118 - DNA, 345 bp, Gossypium hirsutum
  Clone ID: LIB3197-050-Q1-M1-A10
caaagaacagtatggtgacatacgataaacctaacctgagaaatgcagttccaatttctcgtaaccagaggcatgttctgtctcaaagtctttcatttcctgcaagaagaatccatggggatggtcttgtgaagagcactgatctcaaacattcccaagagaaaagctcaaaaactcatgccccttcttccaatggatcaactagtttgagtcatcccaacaggcgcggatccatccatgtcaatacaaagccggcaaatgcaaatggtgggggagcttcttctagaaggaccactatagcatctttgcctagcaataagccggcaaaatctggtcctggaaata

SEQ ID NO: 52119 - DNA, 401 bp, Gossypium hirsutum
  Clone ID: LIB3197-050-Q1-M1-A11
gcggcggtttgggatcgatgcttcaaatattgcggcatatgttgcgaggagtgtaaatgtgttccttccggtacttttgggaacaaacacgagtgtccttgctacagagacaaggtgaataacaagggcaaacccaaatgcccttgaaaatgaaatatattcgagttcgggatttcatcaagcttaaagatcgaggacgaagaggctatatatatatatgcatgctgatggtgttattataaaaatgaactgttttattgctgttgttttccttcgggtttttgttttggtagtgttgaataaaatttcccttatattttcccatcaccgccgtgttcaccgccatgcacacatgttttgttgtcttttgatcatgggtggcggtggtggtggtgaaaatg

SEQ ID NO: 52120 - DNA, 272 bp, Gossypium hirsutum
  Clone ID: LIB3197-050-Q1-M1-A12
cgcttacgggaaagacgatcactctcgaggtcgagagctctgacacgatcgacaacgtgaaagccaaaatccaagacaaggaaggcatcccgccagaccagcaacgtctcatcttcgccggaaagcaactcgaggacgggcggactttagccgattacaatatccagaaggaatcgactcttcatctggtcctgcgtcttcgaggtgggatgcagatcttcgtcaagactttgaccggtaagacgattactttagaagtggagagctcggat

SEQ ID NO: 52121 - DNA, 392 bp, Gossypium hirsutum
  Clone ID: LIB3197-050-Q1-M1-A2
ggatccgccaagcttcaaatggcaacccagttgcctgatttcatgctgatcttcgtcatcagttgcctaggtttcatctccctttgtaaaccaatcctcggtttcatcaaatgggtgtgggtcatgttcctcaggccgccaaagaatctcaagcaccactacggttcatgggccatagtcaccggctgcaccgatgggatcgggacagccctggcgttccaactggcatccaagggtcttaacttggtcttggtggggcgaaaccctttgaaacttgtagcaaccgccgatgccatacgtgaaaatttcggcgcacaagttgggaccagaaacgtcgtcattgacttggcgaaaaccagcggagaagagatatcaaagacgatggaggatgc

SEQ ID NO: 52122 - DNA, 377 bp, Gossypium hirsutum
  Clone ID: LIB3197-050-Q1-M1-A3
atcccaagccaaaaaggatggctaaatgctcctgggagtcgggcgcagcctcacaccagctgcctcctccactcagcattccatggaccgaattgtgccctgggtggcctcagacttttgggtattgataagcagatggatttgagtttttctaaagaatattcgtattacctccttcttctaacttgccctatttgcaaaagcacttttgtagtaacaactattgagtcctgtcagacctccacggacagcaaagtggttttaatgcaagcccaaggatcctttgggtcttatctcaagagctctgggaggtggaagcatggggtgtgatcggtggaccaaggtgataagcgtctgtgcatctgcctgtccctata

SEQ ID NO: 52123 - DNA, 398 bp, Gossypium hirsutum
  Clone ID: LIB3197-050-Q1-M1-A4
aaagaagcagccttattcatttctctcaatttcccccttttcattttttgaatttgcaaattttatcaatcttgtttgaaaattcgcttcgatttctcgaattccaaggtattgccatttggaatttaatctatttccttatttggttattgatattctctttcgatttcgaaattttcgtaatcaaattagggttctccttaattgccgattcgaatttacgagaattcgatcgataaaaccctgattcagctcctacccatttcaattccgaccaaaacacggaaaacctggttttcgatttctaaaaggaaaaagaacactcgcacttcaaaaatctcggttaccttttccgaaaaccctttttctggttctaattcccaattaatcccaaagaa

SEQ ID NO: 52124 - DNA, 277 bp, Gossypium hirsutum
  Clone ID: LIB3197-050-Q1-M1-A5
ctcttttttaaacttattttaactaagggtgcgccgcgtcaactcaacctcactcttcgccccttcttgctgcgacccatctatcttccacttatccccccctccttttttgcatatataccccccacccttcccttctttcccccatttttttctttccctttctctttcttttataggttgttgcagcttcttcttcaagagacggctcttttttttcttttcttttcttggctttctgggttttcggttttggtcctttcactggcccctcgcc

SEQ ID NO: 52125 - DNA, 374 bp, Gossypium hirsutum
  Clone ID: LIB3197-050-Q1-M1-A6
tcccgggatccaagaaacaagtggccttggagaaacgcagagcagcccagaaccagtggcaactacaacaggagaagcatctgcagcatctggcaaaagtttctgcagaggtgagggagcgtaagacagggactcagcaggagcttgagggggtgtttcagaaacttggaaacctgaagcagcaggcagaacaggagcaggacaagctgcagaggtaccagaccttcctccagcttctgtataccctgcagggtaagctgttgttccctgaggctgaagctgaggcagagaatcttccagatgataaaccccagcagctgactcgaccccaggagcagagtacaggagacactatggggagagatgctggtgtg

SEQ ID NO: 52126 - DNA, 261 bp, Gossypium hirsutum
  Clone ID: LIB3197-050-Q1-M1-A7
gcggaaagagaccttccatctttcctctgtgatgcttattctacggattctgtatgcatctcccaattttcaaaaacctaatgataatgtgagagagcgcaatacaagtactcaacaggagcttggcgatggcaacaaaaattgccatcctagaatcatcaaggaaacacgaccactacatagtgaacatgctccagaaattactgcattaccatcagaggataatatgcaacatttcaatgcgataatccttggtcccac

SEQ ID NO: 52127 - DNA, 355 bp, Gossypium hirsutum
  Clone ID: LIB3197-050-Q1-M1-A8
agaaaaacaagtcccttcttatctttgcagggagaatagagaaagaatatccaatggaaggctacaagaatgcttctaaacacatagcagtgttggctttccctttcggcacccatgctgttccttttctcaacattatccgtcaactatcagacgcttgccccgacaccatgttttacttccttagcacccaacaatcaaacaactgaacttttcccaaaaaccttgataaaattaacccttttaatgtatgggatggattacctgaggggtatagctctaaggggaatcctcatgagcccgtcgattatttacttaaggcagatcctgggaattttataaaggctatcgatgc

SEQ ID NO: 52128 - DNA, 401 bp, Gossypium hirsutum
  Clone ID: LIB3197-050-Q1-M1-A9
ctaatatacacatttctaattttctctcaagcttcttgctggtgtgcgggctatggagagttgataaatccgttggttttcttctttgtttctcaatccaacttcatcaagcttcgttttcctgcaaattcatacgctttcgatctccattatctctaaatccaagttctaaattttgttgctgactggtgaagcttcaggtatgtgggcaggtggctttcgagtcgactttaagactgatatagtcctttacctacaaatttttgtttgagaatttggggtaaaaattgctttaagtaaaagtaattacatgggaattcagacaatggggtctcaaagtgatagtggtagtaatggaaaacagttgcaattccagcagttaactcagcaaaattcgatgt

SEQ ID NO: 52129 - DNA, 432 bp, Gossypium hirsutum
  Clone ID: LIB3197-050-Q1-M1-B10
attcccatttccaatctccagctcccaaggtaaatatgccgatcagaaacatagcagttggccggcccgaagaggcgactcaccccgatgctctcaaggcagctttggctgagttcatctcaaccttgatcttcgttttcgctggatcgggctcaggaatggcttttaacaagttgaccgacaacggagcaacaaccccggccggtctcgtagccgccgctctagctcatggcttcggtcttttcgtcgctgtctccgttggcgccaacatctcatgtggccacgtcaaccccgccgtcaccttcggtgctttcgttggcgggaacatcactctcttgcgcggcattctttactggatcgcccaactcctaggctcaaccgtcgcttgcctgttgcttaagttcgctaccggcgacctggctgtaccagctt

SEQ ID NO: 52130 - DNA, 424 bp, Gossypium hirsutum
  Clone ID: LIB3197-050-Q1-M1-B11
attgctctgattcttgttcacgtcaagcttgacaggtagcactgaagctttggcttaaatgggtatttgctattgtaggcattttctgtttttctcaatggcaatggatgcttcactgactatgtgcaaatcggtcacatcacctcctggcttattcttggggagaagtagagttattaggagttcccagtgtacctttatggtgggaagcaggatcaactttcctaggcagaaagctcagtcaacccaagttaaatgtaaatctagcaggtgtggagtagctcttggtgctaaatgccgtgctgagaaaattttggtggcaaatagaggagaaattgctgttcgtgttatccgaacagctcatgagatgggaataccatgtgttgctgtttactctacaattgataaggatgcacttcatgtg

SEQ ID NO: 52131 - DNA, 425 bp, Gossypium hirsutum
  Clone ID: LIB3197-050-Q1-M1-B12
atcgccccgcgagcacagagcctcgcctttgccgctccgccgcccgttcacacccgccgccagctcgccatggatgatgatatcgccgcgctcgttgtcgacaacggctccggcatgtgcaaggccggcttcgcgggcgacgatgccccccgggccgtcttcccctccatcgtggggcgccccaggcaccagggcgtgatggtgggcatgggtcagaaggattcatatgtgggcgacgaggcccagagcaagagaggcattctcaccctgaagtaccccatcgagcacggcatcgtcaccaactgggacgacatggagaagatctggcaccacaccttctacaatgagctgcgtgtggctcctgaggagcaccccgtgctgctgaccgaggcccccctgaaccccaaggccaaccgcgagaagat

SEQ ID NO: 52132 - DNA, 425 bp, Gossypium hirsutum
  Clone ID: LIB3197-050-Q1-M1-B2
gacttttgcaaggataagaagaatgaaatgaacatctttgttcacacgtacatgcaaaagacaacttatgttacatatcacatcaaggatgtcaaactacagtttcctgttttcaaagaggcaatggtgcgccaggaagatctatttatggaccttaagttggtccgtggaattggtcctgcatatagagcatgtcttgctgaaatagttagaagaaaggcttctatgaagctttacatgggcatggctggtcatctggccgaaaggctggcaacaaagagagaagttgaggtcaggagacgagaggagtttttaaaggcacatggtttgtatataccgaaagatgtactggcttccatggggctatatgatacccctaaccagtgtgatgtcaatatagctccttttgacacttcattgctcga

SEQ ID NO: 52133 - DNA, 422 bp, Gossypium hirsutum
  Clone ID: LIB3197-050-Q1-M1-B3
gggattccaaatgttagatggtttggagttgagggagactataatgttatggttatggatttacttggacctagtcttgaagatctatttaatttctgcagtaggaaactctcattgaagtcagttctcatgcttgctgatcaaatgatcaatcgtgtcgaatttgttcattcaaaatcatttctacatcgggatatcaagccagacaattttattatgggcttgggaaggcgtgcaaatcaggtctatatgatcgactttggtcttgctaagaaatatagagacagttcacatcaacacattccttacagggagaataagaatctgactggaactgcaagatatgcaagcatgaacacacacttgggcattgagcaaagccgtagggatgatttggagtctcttggatacgtgcttatgta

SEQ ID NO: 52134 - DNA, 217 bp, Gossypium hirsutum
  Clone ID: LIB3197-050-Q1-M1-B4
atgcatactagtttatcaggtcgtgtaatttacatgctttctaatataaaaacatatataaagttcgtattggattgcatttgtcaatgtttttatttcattaccctcaaacacaaacatagacacacttgcactgcatttattattactggataagggtgtatcatgggcgtttttaactttatgtatatttatgggcatgtcttgtttcaatttc

SEQ ID NO: 52135 - DNA, 435 bp, Gossypium hirsutum
  Clone ID: LIB3197-050-Q1-M1-B5
cggacgcgtgggttgagaaggaaaaaacagattcaaaaccctaaaccatacacatgtgaaagaacaaataccaatattacgacgaacttcgtcatcattttataaggggaaattggggataaccccaatattatgattgattaaaaatatatataaaaggggggggggtcacagactcacagttagtgcagactgctctgtcctgagtttcgtgtttaaattgaaatgctcgtttggtgtattaaaaggcagattgctttagccaacgccaaaaatctgattctgagtctcacttgtttctcatcacaacttactcgcagtgcaggtatgtcttcgatggcagagaagaaagatgtggacaaagataaacccatcactcgtgttcttttttgcggaccacattttccagcttcacaaatttataccagagagtac

SEQ ID NO: 52136 - DNA, 427 bp, Gossypium hirsutum
  Clone ID: LIB3197-050-Q1-M1-B6
cgaaaaagaacgcagtcttttgatctctgccccaaagcaaaaagttgtcatcttttacaatcacaactactggttatttattttcatggctcaaggagattctaacttccagcaagacatggctaaagaggaagaagaacagaggctgaaatacttggagttcgtgcaagtagccgccgttcacgccgctttgtgcttcaccaacctttacctttacgctaaggaaagatcggggccgttgaaacctagcgtcgagaccgttgagggaacggttaagagtgtggttggaccggtttatgataaataccatgatgtccctgttgaattccttaaattcgttgattccaaggtgggtgaatcagtgaccaagcttgatcgtcgagtccctccagtcatcaaacaggtctcaaccgaagccatcttggca

SEQ ID NO: 52137 - DNA, 438 bp, Gossypium hirsutum
  Clone ID: LIB3197-050-Q1-M1-B7
ggaagttcaacttaaggatggcagagttctggaagctgacattgttgtggttggtgttggtggaaggcctcttacagcactatttaaagggcaggttgaagaggagacgggcggaataaagactgatgctttttttcaaaacaagtgttcccacagtatatgctgtgggtgatgtggccactttccctctgaagttatacaatgagttgagaagggttgaacatgttgaccatgcccggaaatctgccgaacaggctgtaaaggccatcaaggggcttgagaaggggcaatcagtcgacgaatatgactacttaccgtacttctattcccgttcctttgacctagcatggcaattctatggcgacaatgttggggatactgtgctttttggagacaacaacccacaatcaccgaagccaaagttcggatcttattgga

SEQ ID NO: 52138 - DNA, 413 bp, Gossypium hirsutum
  Clone ID: LIB3197-050-Q1-M1-B9
cagaatttgatattaaggttctagttgctgctgctgtagccttcaagggtgttgggggtatcctttttatctttggcagcactatcggtgcttatcttctggctctgcaacaggtaattgttactaccatattgtacgacttctacaactatgacacggaaaagaaagaatttgggctactcttttcaaagttctcacagaacttggcattgctgggggcattactcttcttcatcggcatgaagaactcaatccccagcagacaactcaagaaaaaggctcctaaaaccaaaacagtttgaaggaggaacatctggtaaaccaagggtctattgctcaatctctacgttttccttagtcaacccagatttattttttgtatgctttgtatcaaagctttgttcttcaatatt

SEQ ID NO: 52139 - DNA, 434 bp, Gossypium hirsutum
  Clone ID: LIB3197-050-Q1-M1-C1
ctttgacgtcaggtcattaccactccttcttccagctgtagaagatggcatctttaacgacaattggcgaattagacaaagctctgtggagctattaggagatctcctgtttaaggttgccggaacttccgggaaagctttacttgagggtggcagtgatgatgaaggtgctagtactgaagcacatggacgtgctattatagaggttctgggaagggataagcgcaatgaagttcttgctgcattatatatggttcgaactgatgtcagcattactgtacgccaggctgcattacatgtatggaagactattgtagcaaatactccgaagacgctcaaggaaataatgcctgttttaatgaatactctaattacttctcttgcatcagcatcctctgaaaggcggcaggttgctggaagagcactgggagaac

SEQ ID NO: 52140 - DNA, 426 bp, Gossypium hirsutum
  Clone ID: LIB3197-050-Q1-M1-C10
gaaaaatggagttgatggaccttttcattatcggtttggcacttattttcatccgtctatggtggcggtactcgtcggtcactggcggtggccctaagaacctccctccaggaccgcctcgttggccattcgttggaaacctgatccaaatcattctccaacgtcgacatttcgtctttatagtaggtgagctacgtaaactatacggtccaattttcaccttgcgaatggggcaacggaccatggtgattgttacagattcgagtctcatccatgaagctttggttcaaaaaggccacactttcgcttcccgtccaccggactccccgatccggctcgtgtttagcgtcggaaaatgcgctatcaactccgccgagtacggacctctctggcgaaccctgcgcaagaacctcgtcaccgagctta

SEQ ID NO: 52141 - DNA, 426 bp, Gossypium hirsutum
  Clone ID: LIB3197-050-Q1-M1-C11
gtgtttctctccttctcgccgtctcgcgtgcgctcctgtggctctcttcaaccctcgcatatctcttcaagatctgatctgatctgacaaaaaaatgttcgggagagcaccaaagaaaagcgataatactaaatactatgagatattgggagtgcccaaaaccgcttcccaagatgatttgaagaaggcttacagaaaagctgcaattaagaatcatccagataaaggcggtgatcctgaaaagtttaaagagttggctcaagcttatgaggtgctgagtgacccagagaagcgtgagatatatgatcagtatggtgaggacgcccttaaagaaggaatgggtggaggtggtggtgcccatgatccatttgatatcttccaatccttctttggtggcaatccttttggtggtggtggtagcagccg

SEQ ID NO: 52142 - DNA, 430 bp, Gossypium hirsutum
  Clone ID: LIB3197-050-Q1-M1-C12
tacctcactgcccctaaaatttaatcgaggagatctcgttgttctttagctccgttttgcagccatggctactctagattccgatgtgccgatggtgcccgccggtgaagcttccggtagctccgccgcgtcttcctctactaagaagcccaagcgcttcgagatcaagaagtggagtgccgttgccctctgggcctgggatattgtggtggataattgtgcaatttgcaggaatcacattatggatctctgtatcgagtgccaagctaaccaagccagcgccaccagtgaggaatgcactgttgcttggggggtctgcaaccatgcatttcacttccattgtatcagccgatggctcaagactcgtcaagtttgcccattggataacagtgagtgggagttccaaaagtatgggcactagagagctttc

SEQ ID NO: 52143 - DNA, 322 bp, Gossypium hirsutum
  Clone ID: LIB3197-050-Q1-M1-C2
ctttgacgtcaaggcattaccactccttctttgagctgaagaagatggcatttttaacgactatgggcgaattagacaaagctctgtggagctattaggagatcgaacagttaacgttgccggaacttgcgcaaaaggctatacgtggagggtggcaacgatgaggagcgtgcttgcactgaaggacagctgcagactatcatggaagttcggagaaggggtaaggacattctacggcttagtgcggtaacaaaggatccaactgtagtgaggaatactggacacgatgctgacatagatggaaagaagaatgttgctaaag

SEQ ID NO: 52144 - DNA, 208 bp, Gossypium hirsutum
  Clone ID: LIB3197-050-Q1-M1-C3
tgcacaactaaaggagtataggggtaagattgaagctgagcttagcaagatctgtgatgggattttgagccttcttgaatctacctattccttggctatctgctgagtcaaggctaccttaagataagggtatacagttgtggttaactggctgaggagaccaaccttgtgctcagtgtcagatgttgtactgtcatacatagggtgt

SEQ ID NO: 52145 - DNA, 432 bp, Gossypium hirsutum
  Clone ID: LIB3197-050-Q1-M1-C4
atcaaaggaaatcaattttccgtatcccctggggttgactctgcttcacatggtcttctcgtctgttttatgtttcttactcactaaagtcttcaagattttgaaagttgaagaaggaatgacgttagaaatatacacgacatctgtgatcccaattggtgccatgtttgcaatgactctttggctgggaaacactgcctacttgtatatatcagtggcatttgcacaaatgctgaaggcaattatgccagtagctgtattcatccttggagtagcagcaggactggaggtaatgagctgcaggatgcttttaataatgtcagtgattagctttggtgttctggtggcttcttatggagaaataaatattagctggattggagttgtttaccaaatgggtggtgttgtcggagaatctttaagacttatatt

SEQ ID NO: 52146 - DNA, 430 bp, Gossypium hirsutum
  Clone ID: LIB3197-050-Q1-M1-C5
cggaaggcgtcttgatacacgccctcatttattttatttttcaaacaaattttcccttcagttttcgtataatttcctaggaaaagaaaaatgagagagtgcatttcagttcacattggtcaggccggtattcaggtcggaaatgcttgctgggaactttactgtctcgagcatggcattcagcctgatggccaaatgccaagtgataagactgttggtggaggagacgatgctttcaacacctttttcagcgaaactggtgccgggaagcacgtccctcgcgccatctttgttgatctggagcctactgttatcgatgaagtgaggactggtacgtaccgccagttgttccaccctgagcaactcatcagtggcaaagaagatgctgccaacaatttcgctcgtggccattatacaattggcaaagaga

SEQ ID NO: 52147 - DNA, 419 bp, Gossypium hirsutum
  Clone ID: LIB3197-050-Q1-M1-C6
gtcttgatacacgcccccatttattttatttttcaaacaaattttcccttcaattttcgtataatttcctaggaaaagaaatatgagagagtgcatttcagttcacatcggtcaggccggtattcaggtcggaaatgcttgctgggaactttactgtctcgagcatggcattcagcctgatggccaaatgccaagtgataagactgttggtggaggagacgatgctttcaacacctttttcagcgaaactggtgccgggaagcacgtccctcgcgccatctttgttgatctggagcctactgttatcgatgaagtgaggactggtacgtaccgccagttattccaccctgagcaactcatcagtggcaaagaagatgctgccaacaatttcgctcgtggccattatacaattggcaaag

SEQ ID NO: 52148 - DNA, 425 bp, Gossypium hirsutum
  Clone ID: LIB3197-050-Q1-M1-C7
ctctctcttattatctttttctttctttggtttataaaagaaaaaaaaaagaaaatcccaataccataacaatgagagaaatcctccatgttcaagccggccagtgtggtaatcaaattggtggcaagttttgggaggtagtatgtgatgaacatggcattgatgccactggtaactatgtcggcacttcgcctgttcagcttgaaaggcttaatgtttactataatgaagccagaggtggcagatatgtgcctagagctgtgttaatggatcttgagccaggaactatggacagtttacgaacaggtccttatggaaaattgtttagaccagataactttgtgttcggccaaaatggagctggcaataactgggctaagggacattatactgaaggagctgaattgattgattcagttcttgat

SEQ ID NO: 52149 - DNA, 400 bp, Gossypium hirsutum
  Clone ID: LIB3197-050-Q1-M1-C8
ggaaaagaaaaaaatacaaagaaaaaaaaatcagaggagaactcagaaatcaaaagaaacaaagcaagagttgaatcgatctacactctgttatcaaagctgcgaaatttttgtgttaaaggaaaaagacttgaaagtcataagagaagctaagatccgagaagagatgttagaccgggaagcttcacttagacaagcaagagcagaagcatctctttctgatggtatctcatgggtaagctttgaccagaaaaaggcaaagccaattagggattttagaaaagttgccctccacaaggtataaagatgaaccaagtattatgaagtacataaagtttgcagctaccttgcctgataaaactgtacgtgatgttgcattgaggtgttggtggatgcaaca

SEQ ID NO: 52150 - DNA, 436 bp, Gossypium hirsutum
  unsure (1)..(436): unsure at all n locations; Clone ID: LIB3197-050-Q1-M1-C9
cggcgcgtggggaagcagccagccacagcattcgccgcacggcatcagtctcatcaggcggggaagaatgtctcacaggaagtttgaacacccaaggcatggctcccttggatttcttccgaggaagcgagcttctcgtcacagagggaaagtgaaggcatttcctaaggatgacccaagcaaaccttgcaagctcactgcctttttgggctacaaggcaggcatgacacacattgtccgagaggtcgaaaaacctggatctaagcttcacaagaaagagacatgtgaagctgttacgatcgttgaaacccctcctatggtgattgttgnggttgttggttatgtcaagacaccacgtggtcttcgcagcttgaacaccgtttgggctcagcatctgagcgaggaagtcaaacgtaggttctacaagcattggtgc

SEQ ID NO: 52151 - DNA, 434 bp, Gossypium hirsutum
  Clone ID: LIB3197-050-Q1-M1-D1
gccaattgtttgagctagctagctcttactcaaatggcaaccaaaacgatgatgttgcaaatattttcacttttcttctttttgttcagtatctgcaactccattttccttggtgctaatggagatgacaatggtggttggcaaactgcccatgccaccttctacggtggtgctgatgctaccggcacaatggggggagcttgtggttatggaaacctgtacagtcaagggtatggaacgagcacagcagctttgagcactgcacttttcaacaatggcttgagctgcggtgcctgctacgagctccggtgcaacaatgatcctcaatggtgcattagtcgaaccataaccgtgacagccaccaacttttgtccccctaactatgctttatctagtgacaatggcgggtggtgcaatcccccacgagaacactt

SEQ ID NO: 52152 - DNA, 433 bp, Gossypium hirsutum
  Clone ID: LIB3197-050-Q1-M1-D10
ttggcatttcatgagctcatgggcccaaatctgtagcgggtccaactccgtctcagtctcgccgtttctcgagcggaccaaagtccgaaacacccgcgtgaagctggatctctcgctcccacctaaccctgtcaacggtgacgccaaccaaggcccccagctgagggagaaactcttcaggttttctgaagctgccatcgacaagatcaagtcaaaagtcaactctaccccaccatccgactcctctaaaccattctcaactttccaatctctagcttatcacgtttggcaccacgtaaccctagcacgtgaactcaaacctcaagattacacagttttcactctcttcgcagattgtcgtaaaagggttgatccacccatgccagaaagttacttcggaaacctgattcatgccatcttcaccgtcacggca

SEQ ID NO: 52153 - DNA, 255 bp, Gossypium hirsutum
  Clone ID: LIB3197-050-Q1-M1-D11
ttgcaattcaatgagttcatgtgccactaggagtagcgcttccaacttcatctaaatttcatcgctaattgagcggaacctagtgcagaacaccctcgtgggtatgaatctctctcatggacttatccctatcgacggatgcgccaaccaatgtctctaactgatggataaactctttaacttttctgaagctgccattgtcttgatcacgtaaaaagtaggactctatgacacacatgcaactattctaaacca

SEQ ID NO: 52154 - DNA, 343 bp, Gossypium hirsutum
  Clone ID: LIB3197-050-Q1-M1-D12
gtgcttggattcgaattgggttactcgatggagaatccaaattcattggttatgtgggaagctcagtttggtgactttgctaatggtgctcaagtgatatttgatcagtttataagtagcggggaggcaaagtggctgcgtcaaactggtctcgtagtgctgcttccccatggttatgatggacaaggtccagaacattcaagtgcacgactagagcgttatcttcagatgagtgatgacaatccttttgtgatacctgagatggatacaactcttcgtaaacacattcatgagtgcaactggcaggtggttaacgttacaacacctgctaattacttccatg

SEQ ID NO: 52155 - DNA, 412 bp, Gossypium hirsutum
  Clone ID: LIB3197-050-Q1-M1-D4
ctaccggtcctcgccaacgctctcccgaggaactcgatcgcaaccgtcttggcggcggatttaaatcctatggttcgaaccgatacaattccaacggcgatgattcctcaagtaatagtagatggggatcttctagggtttcaaatagagattccaataaagaaatggctccctcacgcgccgatgagatggataattgggcgtcggctaagaaatcgactcgtgctgggaacggatttggggttggatttgagaggagagagagaggagggggagggttttttgattcgcaatcgaaagccgatgaagtagataactgggcatctaataagagtagtaaaagcgtgaatgctgctgcaccgccacggaaatttggtggggggtttgagagaagaagcagtttcgattcact

SEQ ID NO: 52156 - DNA, 431 bp, Gossypium hirsutum
  Clone ID: LIB3197-050-Q1-M1-D5
attttctgccacaatgccacctgaagcccttgagatcactaggaagttcatgaacaaaccagtgagaattttggttaagcgtgatgagctcaccctcgagggtatcaagcagttttatgtgaatgttgaaaaggaggaatggaagcttgaaactctttgtgatctctatgagacccttgccatcacccagagtgtcattttcgtgaacacaaggcgcaaggttgactggctaactgacaagatgcgaagccgtgaccacacggtttctgccacccatggagacatggaccagaacactcgtgacatcatcatgcgtgaattccgctctggttcttctcgtgttctcatcacaactgatctccttgctcgtggtattgatgtgcagcaagtgtctctagtcataaactatgatctgccgactcaaccagaaa

SEQ ID NO: 52157 - DNA, 431 bp, Gossypium hirsutum
  Clone ID: LIB3197-050-Q1-M1-D6
cccaaatgtcacaacggttttaacaacgcactaaatagcgttcaactctcaaagaaccaagtcgtcaactttcacggtgcaagccattgcccatgtttctttttccttaccaaatagcccatagcttataattcacaacatcctttggcaagtcaaagcttattagcaaagatggggaagaagagggttatggtgccggccaaggacctggacttgtccaccgtcaaatacgagcatgaagtgatcaaagctcctcatttgacgggtttgatgctgaagttgtttgtgaggatggttgaagctcctgttttaggctctttgatcatgtcttttttgaaaaaacagaacaaaatggttgagatgtcgcagaacactgtgataccagaagcacccatgtttaaacctgaatttactcctcaagatgcacaacc

SEQ ID NO: 52158 - DNA, 100 bp, Gossypium hirsutum
  Clone ID: LIB3197-050-Q1-M1-D7
cttttatttatcgactgtactgatagggggtgtaatacatttttaaggtgtatgcagaagttgatacgtctgtatgttgttgaaaaactgctactaccat

SEQ ID NO: 52159 - DNA, 429 bp, Gossypium hirsutum
  Clone ID: LIB3197-050-Q1-M1-E11
atttttattccgctattttctctctccccaaacacccttttaagccaaaaagaagacaatggccgatcagctcaccgatgatcagatctctgagttcaaggaggcctttagcctattcgacaaggacggcgatggctgcattactaccaaggagctcgggactgtgatgcgatcacttgggcagaaccctactgaggcagaacttcaagatatgattaatgaagttgatgctgatggaaatgggaccatcgattttcctgaattccttaacctgatggcgaggaagatgaaggatactgattctgaggaggaacttaaagaggctttcagggtttttgacaaggatcagaatggtttcatatcagctgctgagctgcgccatgtcatgacaaatcttggtgagaagcttacagatgaggaggttgatga

SEQ ID NO: 52160 - DNA, 434 bp, Gossypium hirsutum
  Clone ID: LIB3197-050-Q1-M1-E4
ggttaagccttttcattaatcctcaagcttttatttttgcccataagtctactcccagtttcccttaatcctccatgggcaaaggcggaggttgtgtcccaagcaaaaagagacaaccttcctctgccgaaggctctgccactgccactgccactaccgccaccaacaacgcacccatcgaagccgatgaagaaactcacgaaactgccagtgtagctgtgaatcctacgaatgcgcaatcagttaccgccactttaaaaatctttattgtttactactccatgtatggtcacgtggagaaactggccaagcggatgaagaaaggggtcgacggcgtggaaggggtagaagcggttctttatcgggttcccgagacgctcccggctgatgtgctggaccatatgaaggtgccgtcgaaaaaccccgaggttcca

SEQ ID NO: 52161 - DNA, 432 bp, Gossypium hirsutum
  Clone ID: LIB3197-050-Q1-M1-E5
ctgacgcgtgggttcacattcatggcagaagcttgatgccggtggtcatctatcacattcatttgaattagaggccaaaaggaagggaatgtttcatggtgctccagcagtcatatatttccgaattcccaccaaggctgttcaacaggaggcgtattcaactccaatcttgcccttagatatccttgaggaaagaccgcctgagaagaagtttgagtgggctaagaggttgatggctaagtatgggtctcaaatctccgtgatatcaattgtggttctgttcatctacctgataataaccccatcaaaagcaagcaagaagaatcgcttaaatagagtgccttcatttaatgcacaacatactttctttgttgtttctgtttgcagttaaaataagttctatggttgggttctggattttctaatgagaat

SEQ ID NO: 52162 - DNA, 433 bp, Gossypium hirsutum
  Clone ID: LIB3197-050-Q1-M1-E6
gttttccttgcccaagtagaagaaacccttcggatcacttcctccgatgtataaattcggactttgacgccataactgccacattgaagggttctcaaagactacgcgataaaccaacatcctcggatcctttcatggagatggcaacagcacagatcaagtctgcccttgtcgaaaagcaccgggactcaaagtacgcgaaaatggctcgagctaggagtcaagaaatatctaaaattgaaggacttgaggtagaaacaaaaagtggaagtcaagcaacatggtggaagcaacttacaacattgacaaaacgatcatttgtcaacatgtgtagagatgtaggatattactgggcaaggattgtgatatacatacttgtatctatttgtgtgggaaccgtcttctatgatgtcggatatggcaatactgcaat

SEQ ID NO: 52163 - DNA, 308 bp, Gossypium hirsutum
  Clone ID: LIB3197-050-Q1-M1-E9
ctcaaaagaaaaaaaaaacacgcagctgaatttggaggaaaatgggtgacgctttgtttgagcttgagcagaatctacgatcccgattggaacaattgacccgtcaagatgaaaacatttttcaaaggtgtgagtcctctgctcttaatcatttcacggctggtgtaattgctggtggtggtcttgtttgtgcagctacatggaagctgaatatgctacttgggtgaaacctttatgatggagctgtctgaatacttggattcttgaaatttgggtaatcacttgattcgtgtcttgccatatacttg

SEQ ID NO: 52164 - DNA, 436 bp, Gossypium hirsutum
  Clone ID: LIB3197-050-Q1-M1-F1
cccacgcgtccggggattttttcatttgtttcttcttacgctcgattacctcacgaaaagagaaaatgaccaagtgttacccaactgtgagcgaggaataccagaagtcagttgaaaaggctaagaggaagctcagaggtctcatcgctgagaagaactgtgctccactcatgctccgtctagcgtggcactcagctggaacttttgatgttaagaccaagacaggaggtccattcggaaccatgaagcatcctgctgagctcgcacatgctgctaacaacggccttgatatcgccgtcagacttctcgagccgatcaaggagcagttccctaacctcacctacgctgacttctatcagctcgctggtgtcgtcgccgttgagattactggtggacctgaaattcccttccatcccggaagagaggacaagcctca

SEQ ID NO: 52165 - DNA, 370 bp, Gossypium hirsutum
  Clone ID: LIB3197-050-Q1-M1-F10
ccaggtagtgttaagctagggagtgggagaaccatatctggagtttcactctacaaagggcggatgttactgcaggcaaacaagcaataccctcttgtttatatgggtagtaactcaagcagccctaatccacgttcattatgcttagagggaactttggatccacatgtcgtttatgggaaaatcacgatatgtgatcgaggaataaatcctagagtgcataagggtcaagtagtgaaagatgctggaggagtagggatgattttgacaaacactgcggcggatggggaggagcttgttgcaaattgtcacctactttcagcagttgcagtgcgagagatggaaggcaaagccatcaaacattatgctt

SEQ ID NO: 52166 - DNA, 410 bp, Gossypium hirsutum
  Clone ID: LIB3197-050-Q1-M1-F12
cttaggcaattctatcgggaatgtgacatatacgggacagtggactttatattcggaaacgcagctgttgttttccagggctgcaatttatatgctcgtaaacccaatccaaaccagaagaacattttcaccgctcaaggaagagaagaccctaaccagaacactgggatttcaattctgaactgcaagatcgctgcagctgcggatttagtccccgtaaaatcatctttcaagacgtttttggggcgtccttggaaagagtattccaggacagttattatgcgttcgtacattgatgattcagtggatcctgccggatggttagaatggaatgggacgtttgctttgagtaccctctattatggggagtacctgaaccgagggccaaggtccaatacgagtgcaagagt

SEQ ID NO: 52167 - DNA, 423 bp, Gossypium hirsutum
  Clone ID: LIB3197-050-Q1-M1-F2
cttctccataacattcgtctctcagatcctttcctcttagatcatcaaatccattcctttttttcaccaaaacatgagggaaatcataagcattcatataggtcaagctggtattcaagtcggtaactcatgttgggagctttactgccttgaacatgaaatccaacccgatggaatgatgcccagtgacacctctgtaggtgtagcaaatgatgctttcaacactttctttagtgaaactggttcagggaaacatgttcctagagctgtgtttgtggatctggaacctactgtgatcgatgaagttaggactgggacttaccgacaacttttccaccctgaacagcttatttctggcaaagaagatgctgccaataactttgccagaggccattatacaattgggaaggaaattgtggatct

SEQ ID NO: 52168 - DNA, 392 bp, Gossypium hirsutum
  Clone ID: LIB3197-050-Q1-M1-F3
cttctccataacattcgtctctcagatcctttgctcttagatcatcaaatccattcctttttttcaccaaaacatgagggaaatcataagcattcatataggtcaagctggtattcaagtcggtgactcatgttgggagctttactgccttgaacatgaaatccaacccgatggaatgatgcccagtgacacctctgtaggtgtagcaaatgatgctttcaacactttctttagtgaaactggttcatggaaacatgttcctagagctgtgtttgtggatctggaacctactgtgatcgatgaagttatgactgggacttaccgacaactttttcaccctgaacaggttatttctggcaaagaagatgctgccaataactgtgacagaggcc

SEQ ID NO: 52169 - DNA, 428 bp, Gossypium hirsutum
  Clone ID: LIB3197-050-Q1-M1-F4
cttcattctcactctctctccactgaactcttgctaaacggtatcgttttagtcagtctttcatcaatggcgaaagaaccggttcgcgtcctcgttactggagctgcaggacaaatcgggtatgctcttgtacccatgattgctaggggagtcatgttgggtgctgaccagcccgtgatccttcacatgcttgatatcccacctgctgcggaggctttgaatggtgtcaaaatggagttggtggatgctgcttttcctcttctaaagggtgttgttgctacaactgatgttgttgaggcatgcactggagtcaatgttgctgtcatggttggtggtttcccaaggaaggaaggaatggagaggaaagatgttatgtcaaagaatgtgtctatttacaagtctcaggcttctgccttggaacagcatgc

SEQ ID NO: 52170 - DNA, 433 bp, Gossypium hirsutum
  Clone ID: LIB3197-050-Q1-M1-F6
tgaccatttctttcttcttgttatctcatccactcccatgggaatttgttggcctaaacctgctaagtgcggtcatgcttcttccactaacttttcaggtggttcaaagactcatacaccagtttccagcaatctcaatgttgatacatctgtttctagcaatctcaaggcttttagctattctgatcttaaaactgccgccaaaagcttccggtcggagactcttctcggagagggaggattcggatgcgttttcaaaggttggcttgatgagaacactttggctcctaccaagcccggaactggaattgttgtagctatcaaaagacttgcggcagaaagctttcaaggccacaaggaatggcttgcagaagttaactatttgggtcagcttcaccatgaaaatcttgtgaagctcattggctattgtgca

SEQ ID NO: 52171 - DNA, 139 bp, Gossypium hirsutum
  Clone ID: LIB3197-050-Q1-M1-F7
tcgttcagtaaattagttttctagtatactggggggcttgcgtcattagggcggtgcttttttttaccattttctgaggtgcgtcttcctctttcttttagggttggctggtatttctggcgggatcatttgttggtag

SEQ ID NO: 52172 - DNA, 356 bp, Gossypium hirsutum
  Clone ID: LIB3197-050-Q1-M1-F8
gtgatggcgatgattctgctgagaaaaccagattgcctgggaacgtggtatcagttgatcatgatgatcagacaaggctgcatacgaggaagaaagccagaggccatgcaaaagggtcacccaagagacgcgcatcatttgaccaatggcaaccaagtctagcaagcattactgaaactgaagaatagggaaatcacacacacatacgtatatgttcttaccttttgaaagaagagtatatgtatatattcttgttgaagattctctctatatctgcttgataaacataaaatgctcaaatattcaaaatttctgaaaaaaattaatatatatatatatatcaatttggctttttt

SEQ ID NO: 52173 - DNA, 209 bp, Gossypium hirsutum
  Clone ID: LIB3197-050-Q1-M1-F9
ccaggtagtgttaagctagggagtgggagaaccatatctggagtttcactctacaaagggcggaggttactgcaagcaaacaagcaatacccttttggttatatgggtagtaaactaagccaccctaattcaagttcattatgcttagagggaactttggatccacatgttgtttctgggaaaatcgtgatatgtgatcgaagaataaa

SEQ ID NO: 52174 - DNA, 63 bp, Gossypium hirsutum
  Clone ID: LIB3197-050-Q1-M1-G1
tcgcggacacgttgtgttcacattcatggctaaagcgtggttcctgcggtcatctatcacatt

SEQ ID NO: 52175 - DNA, 434 bp, Gossypium hirsutum
  Clone ID: LIB3197-050-Q1-M1-G10
aattcccaatgctctctcacaagccgaagcttcaaaattcttagatctccgcttcaatttgagttgtttcctggaaattttttaaaaatttccatcttattcatttttacagtatcaggctgcctttgaagttaattcataatggttgatagcaacaaatcttctggtccacctgaagaaaccccaagccataatcccaatggaaatgtaccttcagaaagtgaccttgcactcgatgagataactgagaaagttcaagagtcccttggcctcgaaaagagacacaagttttgggaatcccagcctgttgggcaattcaaagacttgggagacactagtttgcctgaggaccctattgaagctcccactcctttatcggaagtcaagcaggaaccgtacaatcttccaaccatgtatgaatggattacatgtga

SEQ ID NO: 52176 - DNA, 433 bp, Gossypium hirsutum
  Clone ID: LIB3197-050-Q1-M1-G11
cgcgtccgcggacgcgtgggggcttcctctctcaacagcgccgcctctttgcgtctcttcgtttcttcatcttcttcctcttcctccgccgccgctagactttgtctccgttccacttccctttctttctcttcttctctcaaatccctcgctttctctcctctttctcgccacaagaggggatcggctgtcagtatgtcgagtaccggagggtttagctctgtagccagtccgaaatgcgctgcttcggatcctgatcagttgaagagtgctagagaagatatcaaggagcttctcaaatccaaattctgccatcctattctggttcgtctaggggggcacgatgctgggacctacaacaagaacattgtggaatggccacgaagggggggggccaatggaagtcttaagttttgagtcgagctgaaacatg

SEQ ID NO: 52177 - DNA, 409 bp, Gossypium hirsutum
  unsure (1)..(409): unsure at all n locations; Clone ID: LIB3197-050-Q1-M1-G5
cccacgcgtccgctctgatgctgtgctcgatgcctgccttgcccaggaccctgacagcaaggttgcctgtgaaacatgcaccaagactaacatggtcatggtctttggagagattaccaccaaagccaacgtagactatgagaagattgttcgtgatacatgccgctccattggatttgtttctgatgatgttggtcttgatgctgacaattgcaaggtcttggttaacattgagcagcagagccctgatattgcccaaggtgtccacggacactttacaaagcgttncggaagagattggagccggtgaccagggtcatatgtttggttattgccactgttgaaacccctgaattcatgcctcttatccatgtccttgcaactaagctcggtgcacgtcttactgatg

SEQ ID NO: 52178 - DNA, 377 bp, Gossypium hirsutum
  Clone ID: LIB3197-050-Q1-M1-G9
gaaaattcattttctttggactttctctgggatccgagtcctaggaaagatgcgtgagattcttcatattcaggcggggcagtgcggcaaccaaatcggtgccaagttttgggaggtggtttgcgccgagcacggcatatattcaacgggacgctatcaaggggacaatgatttgcaactggagcgcgttaacgtttactacaatgaaacgagttgcgggaggttcgttccacgagccgtccttattgacttggagcctggcactatggataggtgtaaatccggggccgacaggcagaatttcaagcctgacaactctgttttcggcagtccggtgcagggaataactggggcaaagggcatttcaccgaaggggc

SEQ ID NO: 52179 - DNA, 394 bp, Gossypium hirsutum
  Clone ID: LIB3197-050-Q1-M1-H1
caaagctttccattcacactcggttcttcgtttttgacgagctaactcactcagtcagttactcgttctctctttggctcactcgctcgatctctctctagatttttccgattacaaatggaggatttcgatatcccggcggcggaagacatgatgaacgaagatatggatcttcccgacgacagtcccattctgaaagtcggagaagagaaggagatcggaaatcaaggcttgaagaagaagcttgttaaggaaggtgaaggttgggagtatcctgaaatcggagacgaagttgaagttcattataccggggacggtggtggatggaacacaagttgattcaagccgtgatagaggcactccttttaagtcactctcgggcaagacaagttat

SEQ ID NO: 52180 - DNA, 327 bp, Gossypium hirsutum
  Clone ID: LIB3197-050-Q1-M1-H10
aaaagacatcaggactgataatcttggagccgggtggataaccgctatggctcacataggtcttcgggttaacttattgattgatttcccattgatgacgaatcacgtatgtgacatcgaacagaggcaatttgtaggatggaggcactgaatgtggatgagatagctgctggttttgatagctagcttgaccgcttagatactcacaaactttgccgaatccttgtccttgatcggaagacaagtgcgctgtacgtaggagtttgtattggctactatattgcatttgttggtgttcaagggagaagtggatgggaaaggatggac

SEQ ID NO: 52181 - DNA, 399 bp, Gossypium hirsutum
  Clone ID: LIB3197-050-Q1-M1-H11
atccttttgaaactagggtttgggttggggcagtgctgtattttatatagtatataaggacatttgttctcttatttcgacaagcgccgagacagagcagagcagacagactagaaaagaagagaagatggagcaaacattcatcatgatcaagcctgatggggtccaaagaggcctggttggtgaaatcattggcagatttgagaagaaaggcttctatttgaaagggttgaagctcatcagtgtggatcgatcttttgccgagaagcactatgctgacctgtctgcaaagcccttctttaatgggctcgtagagtacattatcttcggtccggtccgtgctatgatttgggaaggtaagaatgttgttaccacaggtcgcaagattatcggagccac

SEQ ID NO: 52182 - DNA, 422 bp, Gossypium hirsutum
  Clone ID: LIB3197-050-Q1-M1-H12
ccgcacttccctcggccccgaaggcatgaataagatggtaattaatcatttagacaagctctttgttaccaatgatgctgctactattgtcaatgagctcgaggttcaacatcctgcggccaagattttagttctagctggtaaggctcagcaagaggagatcggagatggcgctaacttgacgatttcttttgccggtgagcttctccaaaatgcagaggagcttattaggatgggcttgcaccccagtgagatcatcagtggatatactaaatccattagcaaggcaattgaggtgttgggggaacttgtggagaaagggtctgaaactatggatgttaagaataaagagcaagtgttactcgaatgaaagctgtgttgtagtaaacacatggacaggagacatattatgtcccttatag

SEQ ID NO: 52183 - DNA, 426 bp, Gossypium hirsutum
  Clone ID: LIB3197-050-Q1-M1-H3
gttatctctgagggtgtcttaataaacgccttcgatttactttcggtttccatttacttctttatttctacgtttttgaatttttagtaagcgaaaatgagagagtgcatttcagttcacatcggtcaggctggtatccaagtcggaaatgcctgctgggagctttactgccttgaacatggaatccagcctgatggccagatgccaagtgacaagactgtcggaggaggtgatgatgcttttaacacctttttcagtgaaactggtgctggaaagcacgtccctcgtgctgtctttgtggatcttgagcctactgttattgatgaagtgaggactggtacttaccgtcagcttttccaccctgagcaactcatcagcggcaaggaagacgctgccaacaacttcgcccgtggccactacactatt

SEQ ID NO: 52184 - DNA, 346 bp, Gossypium hirsutum
  Clone ID: LIB3197-050-Q1-M1-H4
gatttttctttcctttaaaaaaaaaacacctcggtttattaattggtcgtgtaaatatatcttgatacctacactgttaacaatctggtactcagagaatgcagaggcagacgcggtatacgacgaggactgccagtatggtaagagggaaacggagtttggaaggagatgaacaccagcacgcggagccaaaacgtgctgctttagctagtgagaatgatgaagctcttaaggtggacagcttgcacaaactttgttcatctttggaacccattcttcgtagagttgtaagtgaagaggtggaaagagctttggcaaaattagccccccctaggcttaatggaag

SEQ ID NO: 52185 - DNA, 418 bp, Gossypium hirsutum
  Clone ID: LIB3197-050-Q1-M1-H5
acgccgcggacgcgtgggctctcaacgtctgggtcggggcagagctgccatttataaagcatagaaggacgtgagccgagccagcagcggccgggacgggccacctgcatggcccctgacttcacttagatacaaaaaaggctatctcatgcacccagcaccaccccgatgggggctatataattcagcttggtggaatcaggcgtaactctgctaataaagactgctctcgacctggctgtcaccgatctcgggttcatattttttacgccattgggtctttttactagccccatttggctccccggatgcaccttgctctttctcaccgctgccggcttcttgttggcgtgcggcttcagaggcgccggcgcggctggctccacttggatgttccgctacttttggggcatgcacc

SEQ ID NO: 52186 - DNA, 389 bp, Gossypium hirsutum
  Clone ID: LIB3197-050-Q1-M1-H6
gatttatcccatcaattcatcaccatctcaactaagttcattccctcgtcctcttcatctctaatcgccaaactctgggttcgccttcttttactgtattcttcttattagatcaccaacttgcctttgctctatagctttcttgtctttcattttgaagctggatcggatcgttttcactcttccttaattctacctttataaaaacatttcaagcatgtaagtttcgactttccctgtttaaatcctattcaaaagaaaaagaaaaaaaaaacccagatattttgtttctatgcaactggctgaagctttgcgtttatctatctaactaggtgtagtttgtaatctggctacctacatacgtactatttcttaaccaagcatttaaa

SEQ ID NO: 52187 - DNA, 348 bp, Gossypium hirsutum
  Clone ID: LIB3197-050-Q1-M1-H8
cccacgcgtccggttttatgattttgaatatctgcatttaccttcgcttacttccccttttctactgggaacaagggtggttgaatattcgtgaatcccaagccacctaggtaactaccacctgtcacaaattctggcatcataaccggaaaattcgatgggaaacacttcctccatgctcactcagtatgacatcgaagaagtacaacaacactgtaacaacgccttttcgcagcaggagatcgtctctctatacgaaagattctgtcagttggatcgaaacggcggcggtttcgtctccggcgaggagtttttgtccgtgcctgagttcgctgttaatcctctctc

SEQ ID NO: 52188 - DNA, 280 bp, Gossypium hirsutum
  Clone ID: LIB3197-050-Q1-M1-H9
cccacgcgtacggttttatgattttgaatatctgcatttaccttcgcttacttccccttttctactgggaacaagggtggttgaatattcgcgaatcccaagccacctacgtaactaccacctgtcacaaattctggcatcataaccggaaaattcgatgggaaacactcactccatgctcactcagcatgacatctaagaagtacaagatcactgtaacaacgccttctggcagcaggagatcgcctatctatacgaaagagtctgtcagtcggatcga

SEQ ID NO: 52189 - DNA, 309 bp, Gossypium hirsutum
  Clone ID: LIB3197-051-Q1-M1-A1
aaaaccttttttcttcattcctgttaccattttcaagagtcttcttctttcaaaaatttccttcaatctggatttcttggccattcttctaccgtcactccttcgttgtggaacaactcatctcttaccagtctccccttattgtggctgatcggagacccagtgaaattcccaatttgactgcctgtagacaagctaaagcctctgcaaggaaaggagatgagacattggaatgaagggactgctttaaaactttcatctctcccctactattacgtgcaatgacccctgacgccgatctggatctat

SEQ ID NO: 52190 - DNA, 407 bp, Gossypium hirsutum
  Clone ID: LIB3197-051-Q1-M1-A10
aatagattctcttccccatttttattttctcgatatctcttggatggtgtgagcaagcaattaagtggaagtcacccgtctaattttagttaaaaagctattaaccacttcggaaacccttttctaggtttgtctcttaaatcttattcttttcaaaggttgtataatcgaaggtttcgacatcttaggaagatttgtttatagatatgtggaagctaaggtcgtctggtctgagttgtggagtttgtgcgaatttccaaataccctttccacgttgtttcatgaattcaataacaacatcctccattgatgtaaaacccaaggttccactctatctaaggccaccttccttctctgcctctctttcagagctgaccaaatggcataaatgggctaaaaatctggct

SEQ ID NO: 52191 - DNA, 421 bp, Gossypium hirsutum
  Clone ID: LIB3197-051-Q1-M1-A11
ataaaagagaaaaaaaaaaagcaaataaaaaggggagaaaaacagaactgttcttctggaacgaagacgatcagcgatatcaaaagcacttccccagtctcctggaattatcttctgcagtcaactccaccatattcctaagtttctctcgcaagctctttgcaatcccaaaaggagaaataaaaatctttttggggaaggacatggcagccgaggaggctcttgacttgtcaactttgcagtctcagctaagtgaaactcatgaaatttggaaccagaagatggaaaaacaccaatgccaggtagattttttacaagacaaaattatggaagtaaaggcttgcttacaggggtcggaggaagaatcaaaggaagtagaagttctttggcggtaggtaaaaactactgcaactttggtggc

SEQ ID NO: 52192 - DNA, 419 bp, Gossypium hirsutum
  Clone ID: LIB3197-051-Q1-M1-A12
gtttaggcttgtttaactgagcttttccagaaggtctgtgcacttaaaggaatagagcaggataaggttcgcatttgggattacttcaacaagagaaagtatgcacagttgtctgtttcaaacaaaaccctagaagaatcaaacttgcagatggatcaagatattcttctggagctagttgatggacatctatcgtcaaaaattggcatggattctacaggaaatgacctagctttggtttccttggaaccttcaagatcacccttgacaattgctgggggcccaaccttgtccaatggccactcaggttacagatcaaatctgtatccaggaagttccttaggctcaggattaacagatatggatgatggttttgatgcatgtaactctgctagaaaaagagagaaggggggcttggc

SEQ ID NO: 52193 - DNA, 295 bp, Gossypium hirsutum
  Clone ID: LIB3197-051-Q1-M1-A2
gtttcaaaattttttccaccatctgataagtgctttttgggtgatggagaagttaaaaatttctccatttcttcagccaaaagtccatttggctgataatttcccattttaacctgccttctcccccaaaaaagtttcttttctctggttctttagaggagctctatacccattttttcacattttcactttcaaaattttggcttactgctttcgattagaattttcagggaaaattctggattactgctttgctttaccctactcggcggctgtggttttgggattgagaatc

SEQ ID NO: 52194 - DNA, 381 bp, Gossypium hirsutum
  Clone ID: LIB3197-051-Q1-M1-A3
cgttgaagcgaaagcttatctcttttcgtctctgaatctgatcaatcaacacctgaaaaggaaaacttacaaacaacaactactactagtctactacccagcactagaagcagctcgtagccagccatggatgaagagtacgatgtcatagttctaggaactggtctcaaggaatgcatcctcagcggtcttctttctgttgacggactcaaggttctgcatatggataggaatgattactatggaggagagtctacatcactcaacctcattcagctctggaagaagtttagaggaaatgataagcctcctgctcatttgggctctaacagagattataatgtggacatggtccctaagtttatgatggcaaatggcact

SEQ ID NO: 52195 - DNA, 233 bp, Gossypium hirsutum
  unsure (1)..(233): unsure at all n locations; Clone ID: LIB3197-051-Q1-M1-A4
gggaagcccgtacgacagcgcgtcacagcgcgagcttcgaaagggaatcgggttaaaattcctgaaccgggacgcggcggctgacggcaacgttagggagtccggagacgtcggcggnggcctcgggaagagttatcttttctgtttaacggcctgcccaccctggaaacggctcagccggaagtagggtccagcggtcggaagagcaccgcacgtcgcgtggtgtccggtgc

SEQ ID NO: 52196 - DNA, 318 bp, Gossypium hirsutum
  Clone ID: LIB3197-051-Q1-M1-A5
attgttatctctgaaggtgtcttaataaacgccttcgatttaccttcgatttccatttacttctctattgctacgtttttgaatttttagtgagcgaaaatgagagagtgcatttcagtccacatcggtcaggctggtattcaagtcggaaatgcctgctgggaactttactgccttgaacatggaatccagcctgatggccagatgccaagtgacaagactgtcggaggaggtgatgatgcttttaacacctttttcagtgaaactggtgctggaaagcacgtccctcgtgctgtctttgtggatcttgagcctact

SEQ ID NO: 52197 - DNA, 332 bp, Gossypium hirsutum
  unsure (1)..(332): unsure at all n locations; Clone ID: LIB3197-051-Q1-M1-A7
taaacctttttcttcattcctgttaccattttcaagagtcttcttctttcaaaaatttccttcaatcttggatttcttggccattcttcgtaccgacactccttcgtggggaacaacctaatttttaccaatctccccttattgtggctgatcggagacccagtgaaattcccaatttgactggctgtgtacaagctaaagcctctgtccggggaagggagatgacactttggaatgaaggcactgttctaaaactttcatcttctccactattacgngcaatgacccctgacgccgatctggatctatttgcctcgaaagctggatcaaaa

SEQ ID NO: 52198 - DNA, 97 bp, Gossypium hirsutum
  Clone ID: LIB3197-051-Q1-M1-A8
caaatgtatgatgtataaactggggctactgctaatgctcggacattaaaattaaatgaggagttgggccacggtgattctatgctttctaataaac

SEQ ID NO: 52199 - DNA, 185 bp, Gossypium hirsutum
  Clone ID: LIB3197-051-Q1-M1-A9
ctttccccctttttttcaaaccctaacgttccaattggttccccaatttcaaatttctccaggattatcaaatcgatcttcaatttcaatcttgtctcccacattaacggctcagattctaatatttctctctgattccttcaccaatagtagcatacagctttcactgagtttcaactatggct

SEQ ID NO: 52200 - DNA, 321 bp, Gossypium hirsutum
  Clone ID: LIB3197-051-Q1-M1-B1
gtgtactgtcttccccttttccatttctcgtaaacaaagtccataacattcgtctctcaaatcctttcctcttagatcatcaaatccattcctttttttcaccaaaacatgagggaaatcataagcattcatataggtcaagctggtattcaagtcggtaactcatgttgggagctttactgccttgaacatgaaatacaacccgatggaatgatgcccagtgacacctctgtaagtgtagcaaatgatgctttcaacactttctttagtgaaaactgttcaaggaaaacatgttcctaaaactgcgtttggggatctgga

SEQ ID NO: 52201 - DNA, 344 bp, Gossypium hirsutum
  Clone ID: LIB3197-051-Q1-M1-B4
cggacgcgtgggattggttttaagatctgggtctgaaactttgcttaagctggaaaggtccttgccattatttgcagaacttccagaaaatattaaatgccttatggactgtgaggctgccactatcttagaaggcattcaggatcaaatggttattctttccagcgatccaactattaagctccctgaatcatttggttcgggactgcagtatgccaagactggtagctattttaccaatccccagtctgttagaaaagttcttcaatatccttgaatttctgttttccatggcacttatattatagataattttcctggcattctttggctttatgccacat

SEQ ID NO: 52202 - DNA, 437 bp, Gossypium hirsutum
  unsure (1)..(437): unsure at all n locations; Clone ID: LIB3197-051-Q1-M1-C1
cccacgcgtccgtaaagttcttatttttatgtttttggtcattttctgtctgggatttccagcttttaagtgcagtctcggtttaattatgaaaactcaaacgaagaaaggaaaaatagggactttgattaattagaaaacgcatcttcttccccttcgctttcgactttcttttaggggttttaaacaaagaacacgagaatccacacggcaaattatggttgacagaagctatcaatgcaaaggtgtgctaatcttagcttatcagagttttggtgtactctttggtgacctaagtatttcaccactttatgtctttaaaagcacattctctggngaattgaagtattatcaatctgaagatgtcatctttggggccctatctttgattntttggactttgacacttcttttctttgtcaaacatgtcattattt

SEQ ID NO: 52203 - DNA, 373 bp, Gossypium hirsutum
  Clone ID: LIB3197-051-Q1-M1-C11
cggacgcgtgggctcctctaaatatgttttgacggtgtccgcgatctcctcctctgctcagattatagagccttcgatttttctttgcttccttctgacttttaacgattcgcttcactgcctttcggatctatctataagcaccaatatgcgcttcagatcgcatagaaaattggcctgattaatacaatcacatgatctccaatcccatgcggatgccaagacttgcgtatattgccctcaagctaatcctgactgggcgtcgaattcctaccgaatcttcatgtgcctggagtgttactgtgaacaccttggtgtaggcgtacacatctcgatctaacgagctgctcctatggattcatggactgggatc

SEQ ID NO: 52204 - DNA, 463 bp, Gossypium hirsutum
  Clone ID: LIB3197-051-Q1-M1-C2
cgccacgcgtcgaggatactgattccgaggaagaactaaagaggctttcagggtgtttgacaaggaccagaatggtttcatatctgctgctgagcttcgccatgtcatgacaaatctcggtgagaagcttacagatgaggaagttgatgagatgatccgtgaagctgatgttgatggtgatgggcagatcaactatgaggagttcgtcaaagtcatgatggccaagtaaggataaaaaatgggtaaaaaggggaacagggcagataagttggctaagatctctatttatatcaatagggcatctatgtttttatgttactaccttttgttggattgttgactgtttctttgtacgcattatttcggggactagaccctaataattacctggttgctctggtttttggtcattaggtctgggttggtagtgtcttaattatctttcttaaatttgggggttttc

SEQ ID NO: 52205 - DNA, 400 bp, Gossypium hirsutum
  Clone ID: LIB3197-051-Q1-M1-C4
cgattttctatttagttttctcttcctccaattaagatgcagatcttcgttaagaccctgaccggcaagaccatcaccctcgaagtcgagagttccgacacgatcgacaacgttaaggcgaaaatccaagacaaggaagggatcccaccagaccaacaacgtctcatcttcgccggaaaacagctcgaagatggccggaccttggccgattacaacatccagaaggagtccaccctccatctcgtcctccgtctacgcggtggcatgcagatcttcgtcaaaaccctgaccggcaagaccataactttggaagtcgaaagctctgacaccattgacaacgtcaaggccaagaaccaagacaaggaatgcattccaccaaaccagcaaaggctcatctttg

SEQ ID NO: 52206 - DNA, 380 bp, Gossypium hirsutum
  Clone ID: LIB3197-051-Q1-M1-C7
ctttttgttacctcgatttcaagtgaatcagaatgggtaaggaaaagactcacattaacattgtggttatcggccacgtcgattctgggaaatcaaccaccactggccacctgatttacaagcttggtggtattgacaagcgtgtgattgaaaggttcgagaaagaagctgctgagatgaacaagaggtcattcaagtatgcttgggtgcttgacaagctcaaggctgagcgtgagcgtggtatcaccattgatattgccttgtggaaatttgagaccacgaaatactactgcactgtgattgatgcacctggacaccgtgactttatcaagaatatgattactggtacgtcacaggctgactgtgctgtttgattattg

SEQ ID NO: 52207 - DNA, 373 bp, Gossypium hirsutum
  Clone ID: LIB3197-051-Q1-M1-C9
aatggctcttcttttctatcatctccctttccttccctttctcttcctcttccttcacttcatcgcttccctttcctctccaacacaaaacctgaacgacaccctttccttctcttttcctcttacttctctccgtatctctcctgatgttaaagttcagaccctgtcttcttctttagttgcaggggccaacaagcatggtacaaggcgtttggcaaggccaaactcgggttcttataattataaaaccacgttcaagtattcaatggcgttgatcgtggctttgccgattggtactccgccgcagactcagcagatggtgttggacactgggagtcaactgtcgtggattcagtgtcataagaagcttgct

SEQ ID NO: 52208 - DNA, 336 bp, Gossypium hirsutum
  Clone ID: LIB3197-051-Q1-M1-D1
gttaaacccctccattcattatttacgttaagttcaaagaaatggctgatcgtgtgatcactcgcgtccacagtctccgtgagcgtttggatgagacccttcttgcacaggaacgagattttggccttgctctcaaggatcgagggcaaaggaaaaggaattctgcaacaccatcaaattattctagagtttgaagctatccctgaagagaacagaaagaagctcgctaatggtgcattttttgaagtattgaaggctagtcaagaagcgatcgtgttgcctccatgggttgcacttgctgttcgtccaaggcctggtgttttggagtacattaga

SEQ ID NO: 52209 - DNA, 431 bp, Gossypium hirsutum
  Clone ID: LIB3197-051-Q1-M1-D10
cttttattatttttgctctttttttgagatctgtgtgtttcttcaagcttcttgaaagcgtcattttggttgagaactggaaaccgctgctgtgatggctccaccaattgagactacagtcaagtcctctgactctcactgcgctccacatcctcctttgaatgaaaggatcctttcgtcaatgaccaggaggtccgtcgctgctcacccatggcatgatcttgaaattggacctggagctcctacggttttcaactgcgtgattgaaattgggaaagggagcaaggtgaaatatgaacttgacaagaaaactggtttgatcaaggttgatcgtgtgctttattcatcagttgtgtatcctcacaactatggtttcatccctcgtactctttgtgaagacaatgatcccttggatgtcctgaatattatgc

SEQ ID NO: 52210 - DNA, 456 bp, Gossypium hirsutum
  Clone ID: LIB3197-051-Q1-M1-D11
gaaaattgatatttgagcgaagaatcttttctgcaactctagttagcaaaaaagaagaaaaggtgaaaaacaatcatatcgaattgactcataaagtacaaattggcgacttgaagctgacatttggataatactcttgtttttgaaacttaaagactttagggttgtcaaaattatataaatttaggcattcttaatctccagttgtatgatcccagttaccccactaactgtttccagtgtttgatggatcgtctacgcccaagacagaggccggtcttctctgggtttacaaaagctgaggtttctcagcatgggaacatgtgatattatcattagtagttgtctttatgaatgaatagtttcagaaatcccggtccaaaatatggtgtctaaattgcggaaccaaaggtgccatggaattatttcatatattcagatttctcagtgtggaaa

SEQ ID NO: 52211 - DNA, 176 bp, Gossypium hirsutum
  Clone ID: LIB3197-051-Q1-M1-D12
gaaaattgatatttgagcgaagaatcttttctgcaactctagttagcaaaaaagaagaaaaggtgaaaaacaatcatatagaattgaatcaaaaactacaaaaaggcgcttaaactggcattggatatactctgtttatgaaacttaaagactttagggttttcaaaattatataa

SEQ ID NO: 52212 - DNA, 323 bp, Gossypium hirsutum
  Clone ID: LIB3197-051-Q1-M1-D2
cggacgcgtgggcccattaccaattcccttcaatttctccattttctctgaaatccaatggatccagtaagcagttggggcaattcctccctcgactccgtcgatcccgaaatccatgacctcatcgagaaagagaagcgtcgccaatgccgcggcatcgagctcatcgcttccgagaacttcacttccttcgccgtcatcgaagccctcggcagtgccctcaccaacaaatactccgagggcatgcctggtaaccgttactacggtggaaacgaattcattgatgagatcgagaacctctgcagatctcgcgctatccaggc

SEQ ID NO: 52213 - DNA, 173 bp, Gossypium hirsutum
  Clone ID: LIB3197-051-Q1-M1-D3
cgaagaaccagagcctgccggaagaaacaagccttctctgtcttttgtccccttcccctgcccctgtttttctttatggtgttgccatggcggagatctctgggtgtaatggaaaccatgaagtagatgcgaatgttaatggtgaaaccagtcatcatcatgctcctccttca

SEQ ID NO: 52214 - DNA, 343 bp, Gossypium hirsutum
  Clone ID: LIB3197-051-Q1-M1-D4
atcaaaagatgatgcttgaagaaactcgtcaactcaatccgacggtcctcgttccgccttggccttatctaggcgatgatctagcagcggagaacaacttcagtgataacggcaaccccttttacctccaggaagcgttagcagcgctgcaatgttacttgccgtccgacgagccgggtttcgagtcggattccgagatttcgggcctttacaatccgggttctccagtcgatgcttactcgtgcgatcattttcggatgtttgagttcaaagtcccgcggtgcgggcgtggcccgtcgcatgattggaccgagtgtccatacgctcatcccggcgagaaagc

SEQ ID NO: 52215 - DNA, 474 bp, Gossypium hirsutum
  Clone ID: LIB3197-051-Q1-M1-D5
ctgcactaaacgactgactagctggaacgcctgcacgcccggggtccgggtccgggatcgacgcgcacgcgctccaggcgccacttggatactgaccttcgaaccttgaagctcatgtgagtctgtcgtgaattcaaggctaacaagatctctgacgatgattatcattaaagccattaaggtggaaattagcactgttgctgaccttcaagaagagctggacattgatctcttggttcatggagagcctgagagaaacgatatggttgagtacttaggtgagcagttgtctgcccttgcatccactgttaatggatgggtgcaatcttactgatctcgatgcgtcaagccagcaatcatttactgggatgtcagccgccccaagccaatgactgtggaacggtcatctaccgcactaagcatgactgcacgcccaatgaaggtaatgcatactgcgcctgataccatgcttaa

SEQ ID NO: 52216 - DNA, 255 bp, Gossypium hirsutum
  Clone ID: LIB3197-051-Q1-M1-D6
tgaactttgccttcaaggattacttcaagaggcttttcaacttcaagaaagacagagatggttactggaaatggtttgctgtgaacttggcatcaggtggtgcagctggtgccttttccttgctctttgtctactccgtggattatgctcgaactctgtctggcaaatgatgctaaggctgcaaagaagggaggagagagacaattcaacgggcttgttgatgtctacaggaaaactcctatatccgatggtatt

SEQ ID NO: 52217 - DNA, 330 bp, Gossypium hirsutum
  Clone ID: LIB3197-051-Q1-M1-D9
gataatggaactggaatggtgaaggccggttttgctggtgatgatgctccaagggcagtttttcccagtattgttggtcgtccccggcacactggtgttatggttgggatgggtcagaaggatgcctatgtaggagatgaagcacaatctaaaagaggtatccttactttgaaatatcctattgagcatggtattgtgagcaactgggatgatatggaaaagatttggcatcatacattctacaacgaactccgtgttgctcctgaggagcacccttgtgcttctcacggaagcacctcttaaccccaaggccaatagagaaaagatgac

SEQ ID NO: 52218 - DNA, 328 bp, Gossypium hirsutum
  Clone ID: LIB3197-051-Q1-M1-E1
gccccaatgaaaatcaatttgctattcttggtgaaaaataatcttgaccggcttttgattttctttccagaaccacttttcacagaagcctgatgaaaaaatgcctcacatggaccaaattttttacctgagcaacctgtggatgggaaccctaaatttatttacgggcctatgccccatttgtgcgacaccccgattgagcgcatattttccactcctatagagaccactttgatgtttgcatgtaacgcgaagcacattgtgttggctaagatagttcaaggatacattcttccatcttctgatggtcactatatatcaacaaaaa

SEQ ID NO: 52219 - DNA, 453 bp, Gossypium hirsutum
  Clone ID: LIB3197-051-Q1-M1-E12
ggaaaggggacatgcttgctgttggtgtcactgagaaagacatgaccaaggatgaaaactccaagtttcaaaactcaattttgaagaacttagacaggctgttaggtggtcttttagctgaggtctcctccgaggaggatttcacagggaaatctggccaatcaacagttcttagacttcctggccttggctcgaaacgggttggtttgattggtcttggacaatcagcttcatcaccatctgctttccgtggactcggcgaggctgttgctgcagcagcaaagactgctcaagccaatagcgtggctgtggtccttgcctcatcagaaggcctctcaaatgagtccaagcttgggtttgcttcagcaatagcatctggaacggtgttgggattacacgaagataatagatacaagtcagagtcaaagaaaccacagcttaaatctttggata

SEQ ID NO: 52220 - DNA, 313 bp, Gossypium hirsutum
  unsure (1)..(313): unsure at all n locations; Clone ID: LIB3197-051-Q1-M1-E2
cttagcaagaacattgtttggttaccatgagaagggatgtgtgagcaggttcaataccgacgctcagcaattcaacaaaaagctcaacgcagcagcaaccaatctccagaagcaacaccctgatctcaagattgtggtttttgacatttacaaggcccttcttgatgttgttaataccccttcaaactatggtttcgtagaagcgacgagaggctgctgtggcacagggactgtatagacaactgaattcttatgcaatccgcatacactgngaacttgtcccaatgcctcccagtatgtgttttgggacagt

SEQ ID NO: 52221 - DNA, 298 bp, Gossypium hirsutum
  Clone ID: LIB3197-051-Q1-M1-E3
ggacactgggagcagcctgtcctggttcccttgcacctctcgttacctttgttcccaatgcgctttccccaatgttgaccctgcaaaaatccccacttttgcccctaaacgttcatcttccaagatgctcgtaggttgcagaaaccccaagtgtagctggctttttggctacgacgatgcgtctcgttgccaagactgtgaacccactttcgaaaactgtactcatacttgccctccttacctaattcaatacggttaagttccactgctgggctactattagtagaaaaccttgttt

SEQ ID NO: 52222 - DNA, 296 bp, Gossypium hirsutum
  unsure (1)..(296): unsure at all n locations; Clone ID: LIB3197-051-Q1-M1-E4
cccacgcgtccgggagagatccctggggagggccgctggagataaacgcggctgattccgccactgatgatgacaggagtaggaatctgcaagacctggacagggctgcgctctctcgccctttggacgagacgcagcagagctggctgctnggccccagcgagcagaagaagaagaagaagtacgttgatctcgggtgcatcattgtcagccgcaagatctttgtctggacggttgggaccttgggtcgctcagccgtccttgccggataatcacctaatccgcaagaccgtcca

SEQ ID NO: 52223 - DNA, 420 bp, Gossypium hirsutum
  Clone ID: LIB3197-051-Q1-M1-E5
gcttaaggaggatccttccttttacttttatcgtttggcttttgtcagccactcttttcttgttcttgttcgtcaacgcctccaacacatattacttaatcaatattttcttcatctgattttgatcggagcatcagtctggttagaagggatctcatggccactactggaaacaagaacatcaatgctaaattagtcggtatctctctctctctctctctctctttaaaccctctttttgctttcaggagtatttttttttctctttaaagttaatactagtattttttgctctggttctttcttagatgctgaattctaacctgggtctggatgaattgtggatcatacttgatttttatgtgaaatgtgaatatagtgttgtcttaattttgaaaaaactgttttgattttggtagt

SEQ ID NO: 52224 - DNA, 432 bp, Gossypium hirsutum
  Clone ID: LIB3197-051-Q1-M1-E6
gagagaacgaatcaaattcaaacggagacagtagcagaataagaacaacacagctgaactgaaagaattttgaaagaaagaaaaagaataaaaaataggttcgtgtgattctccttctcttcgacgactgaaaatgtccggtcgccacgaaaaagagaaaggcgtcaacgtgcaagtcctccttcgttgcaggccgtttagcgaagaggagttacggaataatgcgccgcaagtggtgaagtgtaatgagtaccaacgagaagtcgccgtttctcagaacatcgccggaaaacattttgatagagttttcactttcgataaggtatttgggccattagcacatcaaaaagatctatatgagcaagcagtggtttcaattgtaaatgaagttttagaagggtttaactgtactaattttgctatggttaaact

SEQ ID NO: 52225 - DNA, 400 bp, Gossypium hirsutum
  Clone ID: LIB3197-051-Q1-M1-E8
cactagtagaaggtttagttttacaaacatggctagttccggtgtccttaagttggtttccatgattctcatggtgtgcatgacgatgatgagtgcacccaaggcagccaaagccgccatcacgtgcagcgacgtggtgaaccacttgatcccgtgcttgtcctacgtacaaaacggcggtacacccgctgctgcatgctgcagtggggtaaaagcactctacggcgaggttcagacctccccggaccgccaaaacgtgtgcaagtgcatcaaatcggcggtgaacggaattccgtacaccagcaataacctcaatctcgcagccggcctacctgctaaatgtggtctccaactcccttacagcatcagcccctccactgactgcaacaaggtgcagtga

SEQ ID NO: 52226 - DNA, 323 bp, Gossypium hirsutum
  Clone ID: LIB3197-051-Q1-M1-F1
gaaatatcaagagaaagagattgcatttgagtccgaattatccttcttatcaaggcttcaccacaagcatttggttagacttgttggatattgtgaagaaatggatgaaaggcttttagtttacgaatacatgaagaatggagcactttacgaccacttacatgataagaacaacatcgagaaatccagcagtttacttaattcctggaaaatgaggatcaaaatcgcactcgacgcggctcgagggatcgaataccttcacaactatgcagttccccctataattcatagagatataaagtcttcaacatatactcgatgcg

SEQ ID NO: 52227 - DNA, 454 bp, Gossypium hirsutum
  Clone ID: LIB3197-051-Q1-M1-F10
aacgccttctttcttcttcttcttattcctttattgctttttagaatttttcttaatcgaaaatgagagagtgcatttcgatccacatcggtcaggccggtatccaggtcggaaacgcttgctgggagctttactgtctcgagcatggaatccagcctgatggtcagatgccaagtgacaaaactgtcggaggaggtgatgatgcttttaacacctttttcagtgaaactggtgctgggaagcacgtccttcgtgccgtcttcgtggatcttgaacccactgttattgatgaagtgagaactggtgcttaccgccagctcttccacccagaacaactcatcagcggcaaggaagacgcagctaacaactttgcccgtggtcactacaccattggcaaggagattgtcgacctctgtttggaccgcatcaggaaacttgctgataactgcactgg

SEQ ID NO: 52228 - DNA, 449 bp, Gossypium hirsutum
  Clone ID: LIB3197-051-Q1-M1-F11
gtttcgccattggttcagcagcccttgtgtcccttgccctctttggtgcctttgtgagccgtgctgctatttcaacagttgatgtattgacccctaaagtttttattgggttgcttgtcggggcaatgcttccttactggttctctgctatgaccatgaagagtgtgggaagtgctgctttgaagatggttgaggaagtgcgtcggcaatttaacacgatcccaggtctcatggagggcactgctaagccagactatgctacctgtgttaagatctctactgatgcttccatcaaagaaatgatcccacctggtgcgctagttatgctcacaccccttattgttgggatcttttttggtgttgaaactctctctggtgtcctcgctggatccctcgtctctggcgtccagattgctatctccgcatcgaacacagggggtgcttgggat

SEQ ID NO: 52229 - DNA, 396 bp, Gossypium hirsutum
  Clone ID: LIB3197-051-Q1-M1-F12
gagggcatgggatgtggatgatgacactgccacggccctaattggtaaccaaaagggcaaaggcattgtcaagcttgatgccaatttcaagatgcctgaacccaagcccgatcaccgcaaaggaatggccttgaactgtgaagaagctccgttggacaccgacatcaagaatgccggcaacgtcgtgctcttgaacactaaaaacctccctttggtcggccaggtgggtatgggggccgatctcgtcaggctggaaggtaatgcaatgtgctcccctggcttttcttgtgattcagccttgcaggttacgtacatagtcaacggcagtggtcgtctccaagtggtgggcgtcgacggcaaaagggtcctggaaaccattgtgaaagccggcaatct

SEQ ID NO: 52230 - DNA, 345 bp, Gossypium hirsutum
  Clone ID: LIB3197-051-Q1-M1-F2
gttttcttcttttatttatattccgtgtgtaaaattcgtgtcttcgttagtaaacgacagaacccagcatctcttgtaacctttctctcttctcagatccaacccttttatctgtctccccacctgtttggtgagacttggcgttaatggagtggagcttcaacatgaatcataatcggtacctctaatgctatgctgagacttggctagtttatatctataagtttagactgcgatgattcaataagtagttaatggtcctatcaggcaaaactgatttagttttgtttaaaataggagctttttaatagatagatttgataaagaaaaaggacacagttttag

SEQ ID NO: 52231 - DNA, 340 bp, Gossypium hirsutum
  Clone ID: LIB3197-051-Q1-M1-F3
caaaaacctaaaagaagtttgcttcgaatttgagcaaatttaagcttattaagagagtaagatggcatccactttcacagccatgtcatcagttggctcattcgttgcacctaatggtctggtcatggataagaagctttcatcttcttccaacagattgtcatctttagcatccatttctacatcttcatttgttagtagacgaaatgttgttcttagaagatctcgtctgcccaagatttctgcagcaaaagagctacatttcaataaggatgggtcagccataaagaggattacaaactggtgtgaacaagcttgctgatttggtttgaagtcactc

SEQ ID NO: 52232 - DNA, 447 bp, Gossypium hirsutum
  Clone ID: LIB3197-051-Q1-M1-F4
aaaaaaacctaatggaaatgggtgatcagtacggcctgcctgatttccagcggcttttaacgaggagaacccattttccggcatccctgctgccccaaccttctgactcgccttaccttgctcatcataggaacatggctctatcaccacctccttaccatgaaccaccctacgtgttgagcaatgggaatattgcaatgcctagtggtttgcttaggtttaacactactggtgccactgattttactgctgctgcttcagcttctgctgctgttggtggtggaggatggagtttgggaaatatcgacggcggaaacagccggtggccgaggcaagagactcttactcttcttgagatcagatctagacttgattccaagttcaaagaggctagccagaaaggacccttatgggatgaagtgtctaggtatataaatatattactat

SEQ ID NO: 52233 - DNA, 435 bp, Gossypium hirsutum
  Clone ID: LIB3197-051-Q1-M1-F5
ctcaacgctctccttctgtttctggtcaagccaatctcaaaagactccccttttagctcacagctcctctcttgagtactataatgggtaaggagaaggttcacatcaacattgtggtcattggccatgtcgactctgggaagtctacaaccactggtcatttgatctacaagcttggtggtattgacaagcgtgtgattgagaggtttgagaaggaggctgctgagatgaacaaaaggtcatttaagtatgcatgggtgcttgacaagcttaaggccgagcgtgaacgtggtattaccatcgatattgccctctggaagtttgagactaccaaatactactgtactgtcattgatgcccctggacatcgtgacttcatcaagaacatgattactggtacctcacaggctgactgcgctgttctcattatcgact

SEQ ID NO: 52234 - DNA, 208 bp, Gossypium hirsutum
  Clone ID: LIB3197-051-Q1-M1-F6
ctggaacttttgatgttaagaccaataccggaggggcattcggaaccatgaagcatcctgctgagctcgcacatgctgctaacaacggcctagatatagtcgtcagacttctcgagccgatcaaggagcattaccctaaccttacctactctgacttctattagcttgctggtgtcgttgtcgtagagattactgttggacctgatat

SEQ ID NO: 52235 - DNA, 403 bp, Gossypium hirsutum
  unsure (1)..(403): unsure at all n locations; Clone ID: LIB3197-051-Q1-M1-F8
ctgtttttcacattgataatcttctcttctcgatctatccgcttcgggtttgagagagaagggataaagaatatagagaaaaagagggtaaaatggcgcatagagtagatcacgagtacgattaccttttcaagatcgtgttgatcggcgattctggagttggaaaaacgaatattctctctaggttcaccagaaacgagttttgtttggaatctaaatccactatcggcgtcgagttcgctactagaaccctccaggtagagggaaagactgtcaaggcacagatttgggatacggcaggtcaggagagatatcgagccatcaccagtgcgtactacagnaggggctgtggtgcacttatggtctatgacataacgaagaggcanacctttgataatgttca

SEQ ID NO: 52236 - DNA, 200 bp, Gossypium hirsutum
  Clone ID: LIB3197-051-Q1-M1-G1
cggacgcgtgggctggatcagatcttcccccagttgcccatcttcttccttcaatcattccattatttcagggttttaatctctccttactttttaaacctacgcattaaaaaaaatacacttgaagggaccacatcatcaaacccttaatgctactgccatagtgctggatacgactatggagatttaatgattacata

SEQ ID NO: 52237 - DNA, 418 bp, Gossypium hirsutum
  Clone ID: LIB3197-051-Q1-M1-G10
cccacgcgtccgctagttacaacagccatcccttcctctgtctcacaataatttaagtaaaagttttctttttcaaactctctctctctaatatatagatttccatcttctgtactttaaattctgtctcaaaagataagttccaggcaaggtgtttgattcattgttgaaaagagatgaggggtgatgctcttgtagccattgctgctacaattggtaactttttgcagggatgggataatgctaccattgctggagcaattgtgtacattaagaatgacctcgatctaggaactagcgttgaaggtctagtggtggctatgtcactgataggagcaacagctattacaacatgctcaggagctatatcagattggcttggtcggcgtccaatgctgataatgtcttcaatgcttta

SEQ ID NO: 52238 - DNA, 416 bp, Gossypium hirsutum
  Clone ID: LIB3197-051-Q1-M1-G11
gaccaacaccatcatcaacgacaaggacgaccaagaaactgttcccaagatcataactttcttgtcttctttgctgcaaagagtggcagagtcgaatgatcattgccggttgtttcagtcgcagaagatctcagtttttcatggtcttaccagacctactatttccatcaaaagctatctcgagaggatctttaagtatgcaaattgcagcccatcatgtttcgtggttgcctatgtttatctcgatcgcttcgtgcagatgcaaccgtctttgcctatcaattcttacaatgtgcataggttgctaataaccagtgttttggtttctgccaaattcatggatgacatgtattacaacaatgcctactatgccaaagtgggaggaatcagcacggtagagatgaacctttttgaag

SEQ ID NO: 52239 - DNA, 445 bp, Gossypium hirsutum
  Clone ID: LIB3197-051-Q1-M1-G12
gatcaataaagattgcagattttggagttgcacgtattgaggtgcagactgagggcatgactccagagactgggacataccgttggatggctccagagatgatacagcatagaccctacacgcaaaaagtagacgtgtatagttttggaatagtcctttgggagctcatcactggcttgcttcctttccagaacatgactgcagttcaggcagcatttgctgtggtgaacaagggtgtaaggccagttattccaaacgattgcctcccagtgctgcgtgagatcatgacacgttgctgggacacaaacccagaagttcgtcctcccttcactgacattgtgaagatgcttgaaattgctgaaacggatatactgacaaccgtgcgtaaagcccggttcaggtgttgcatgactcaaccaatgacaattgactgatccagaatgga

SEQ ID NO: 52240 - DNA, 409 bp, Gossypium hirsutum
  Clone ID: LIB3197-051-Q1-M1-G2
atggggcttctgggagacctgctgtagcccgtgtcaccccctgctgcagacccacccactttcagcttaggtcaaaagctgttttctaactcatttccgagaataacggaagggctggagttgcagttgagccagctgtctgaaccagatgaggaaacaagcccagcagggtaaaatgattggtccaaggttgcagccatctgacagctgggtcacttctcctcccactataactgctgcctccatgtgacttgaaacttagagctaaagagaggcccaggggctgccaggtctgatggccaatgggcctggtgcctctgcccacgtcagcctggtcttgggcttctgggacagggtcacccacatcttgaacatggcccgggagattgacaacttctaccctgagcgc

SEQ ID NO: 52241 - DNA, 445 bp, Gossypium hirsutum
  unsure (1)..(445): unsure at all n locations; Clone ID: LIB3197-051-Q1-M1-G4
cggacgcgtgggcggacgcgtgggctcctccttttgtaccaccaccgccaatttcttctccaagtgggaatagtgtcactggtgcaatagctggaggagttgcagcaggtgctgccttactgtttgctgctcctgcaattgcatttgcgtggtggcgtcggcggaaacctcaagaattnttctctgatgtacctgcggaagaggacccagaagttcatcttggacagctgaagaggttttcattacgagaactacaagttgccactgacagttttagccataaaaatattctgggtagaggtggatttgtaaggtttacaaaggaaggttagctgacggttcactggtggctgttaaaagattgaaagaagagcgtacacctggtggngagttacagtttcaacagaggtagagatgatcagcatggctgttcatcgaaatctcc

SEQ ID NO: 52242 - DNA, 340 bp, Gossypium hirsutum
  Clone ID: LIB3197-051-Q1-M1-G6
gacgggaggcgtccaggcgacgcgaccgaccgcattatttattattattatgacttactttgttttttcaagatcataattatcttggattgtttgattgcattagtgattacatcgaatgatcattgatgcatgtcgaaaccgcctgctgctagctttactgtgttgagcatggacttaatactgatgttcagatgtctagtgacaggattgttaaatgtgctgattatgcttcatacacctttttcagtgaaactggtgctgggaagcacgtccctcgtgccgtttttggggatcttgaacccactggtattgttgaagtgagaacttgtgcttaccg

SEQ ID NO: 52243 - DNA, 331 bp, Gossypium hirsutum
  Clone ID: LIB3197-051-Q1-M1-G7
tccacgcgttcggatatctctgagggtgtcttaataaacgccttcgatttactttcggtttctatttacttattatatttctactgttttaaaatattagtaatcgtaatagtgagagtgcattttagatcacatatggcatgctggtatacaagatagaaatgcctgctgagagctttaccgtcttgaacatggaatccagtctgatggtcatatgccaagtgacatgactgttcgaggtggagatgatgcttttaacaaccttttcagtgtaactggtgctggaagtacgatcttattgctgtctttgaggatctaagcctattgttat

SEQ ID NO: 52244 - DNA, 421 bp, Gossypium hirsutum
  Clone ID: LIB3197-051-Q1-M1-G9
cccacgcgtccgccctgttgaatttgaaactcacagcaaaacaatttcttcagaaaacactcccacctaactcttcatttcccctccttcttgactctctcgcctcctccgtccaccgcttatcttcagccaccatctccgcaacaccagaagggactagattcaacagataagtagaatctcctttcttaattccttcagatgctagaaaatgggctaccttgttagcctccctgttagtaaagagaaatacacataaactgaaacttaaactcagcttcaaagcctcattgatataaactgagatctcagaactatcattcatctttttttgcagcttccggattaccgactgagagtctccctcaacctccacctctctcaaaccaagttgtaccccaagatcagagcctgaacacac

SEQ ID NO: 52245 - DNA, 289 bp, Gossypium hirsutum
  Clone ID: LIB3197-051-Q1-M1-H1
atttgccagtaaaaaaggttcagccgacggcagcacagatcgcccgatacgaccatccaatggcggcagctgtggaaacttcaccagttttagagattttagttccgagaaccggatggatattctatctggaatggacctccattcacgaataataatcaacctgagattaagcttgaaaagttccttgcagtctgctaagtatagggaggatgagttcaaggattatggtgacaaaaactgactctgctattggatttatgattccaccacttgaaagagataagat

SEQ ID NO: 52246 - DNA, 266 bp, Gossypium hirsutum
  Clone ID: LIB3197-051-Q1-M1-H11
acggttctggtacaagctagatcgtactttcaaactatctcgggcaaatacatattttcggattaatctaaaaggggcataccgtactttgaagagttgtttgttgactgaactttatattcacctccttaaggatgagctcaatgagattatattttatgccagtattgccaagctagaaacttcagtggcaatgtctgatgacaagttatagctgatgctttatggattcattgataagcttcctgtttatcttgagaaaaatt

SEQ ID NO: 52247 - DNA, 365 bp, Gossypium hirsutum
  Clone ID: LIB3197-051-Q1-M1-H12
caacacacttgctagtattcctacttggagtggtgactctcaccactcccacatttggtacctatgagtcaccaaattatgggaaaccccctactcctgtattcaagcctcccaaggtgaaaccaccaccatatgaacctaagccaccagtgtatgaaccaccaaaaaaggagaagcctgaacctaagccaccggtttatgcacctccaaagaaagagaagcatggacccaaaccaccaatgtatgaacctccaaagaaggagaagcctgagccaaagccaccagtttatacacctcctaagaaagaggagcctaaacctaaaccaccaatatatgaaccctcaaagaagataaacctgacccaa

SEQ ID NO: 52248 - DNA, 355 bp, Gossypium hirsutum
  Clone ID: LIB3197-051-Q1-M1-H2
atcgatctcccgagagtgaagaagatacagagtacaaactagatcgagggcttctgataaaagcttcaaattgatattggctgggtagattgctttttggtaaccaaaaatggtgtacttgggggttcaattgtaagcaaatatggaaaagggcttttattcaagccagttgcggacatgactcgcataagaaatgaagggtttcttggttctttttctaagatggggggaacaggaaagccacacacatattttgagactgaaaaagtgccattttgttattaacccataaaagctctttatttgcttcttggtacaaacaaacagagccacattcttggagaattggagactt

SEQ ID NO: 52249 - DNA, 353 bp, Gossypium hirsutum
  Clone ID: LIB3197-051-Q1-M1-H3
ccacaacccccaagtactcaaaggcaaggtatgatgaaattgttaaggaagtttcttcctacctgaagaaggttggttacaaccctgagaagattccattcgtccccatctctggttttgagggtgacaacatgattgagaggtccaccaacctcgattggtacaagggtccaaccctccttgaggctcttgaccagatcaatgagcccaagagaccctctgacaagccccttcgtctcccacttcaggatgtctacaagatcgggggtattggaactgtccctgtgggtcgtgttgaaaccggtacccttaagcctggaatggttgttacaattcggaccttctgggattga

SEQ ID NO: 52250 - DNA, 365 bp, Gossypium hirsutum
  unsure (1)..(365): unsure at all n locations; Clone ID: LIB3197-051-Q1-M1-H4
caccgttcttcggcttcctcggcgccgctgctgctctcgtcttctcctgtatgggagctgcatatgggacggctaagagcggtgttggtgtggcttcaatgggtgtgatgaggcctgaattggtgatgaaatctattgtaccagttgttatggctggtgttttgggtatttatggcttgattatcgctgtcattattagtactgggatcaatcctaaggccaaatcgtattaccttttcgatggttacgcncatctttcttctggtcttgcttgtggccttgctgggctttctgcttggatggcaatttggaatcgtcggcgatgctggtgtcagaagccaacgcacagcaactccaagcttttt

SEQ ID NO: 52251 - DNA, 329 bp, Gossypium hirsutum
  unsure (1)..(329): unsure at all n locations; Clone ID: LIB3197-051-Q1-M1-H6
caaccatcaaggatcatccgcgaaatttcactctatggcacccataaagggcattctttccttgcaaagggcatctttgttaagagcttgcggtgaaaggtggaaactaggcactagatcatttagtactcaaggagcaacaactgctgatgctccacaggcacctnctnctcctccaccgccttgaaaaacccatnttggtggtctaaaagatgaagaccgtattttcaccaacttatatgggttgcatgacccttttctcaaaggtgccatgaaacgtggtgactggtatagaaccaaagatttaatactcaagggtgctgattgga

SEQ ID NO: 52252 - DNA, 258 bp, Gossypium hirsutum
  Clone ID: LIB3197-051-Q1-M1-H7
atcgcattaccgatcagtgaacaagatactgctttctgactacaatgaggggcattgattaaatcttcaaattgatattgtctggagcgaatggtgaatggtgaccaaaaaggtctaacttgcggattacatatggagcaacatctgtaaatgttcttctatgcacgtagttttttgactatgactgaaattacacatttatggtggtctaaaagatgaagaccgaatatttaccaacttatatgtgttgcatgatcc

SEQ ID NO: 52253 - DNA, 355 bp, Gossypium hirsutum
  unsure (1)..(355): unsure at all n locations; Clone ID: LIB3197-051-Q1-M1-H8
atcgatctcccgagagtgaagaagatacagagtacaaactagatcgaggtcttctgataaaagcttcaaattgatattgtctgggtagattgcttcttggtaaccaagatggttgtacttgcggcttcaattgtaagcaagtctggaaaagtgcttctctccaggcagtttgtggacatgactcgcataagaattgaaggtcttcttgctngctttcctaagttggtgggaacagganagcaacacacatatgttgagactgagaatgtgcgatatgtttatcaaccaatagaagctctttatttgcttttggtacaaacaaacagagcaacattctttgaaaatttggagactt

SEQ ID NO: 52254 - DNA, 381 bp, Gossypium hirsutum
  Clone ID: LIB3197-051-Q1-M1-H9
gtatcgatttttactttaccattacccgtgccaggtttgaagaacttaacatggatctattcaggaagtgtatggaaccagttgagaaatgtttgagggatgctaagatggacaagagcactgtccatgatgatgttcttgttggtggttccactagaattccaaaggtccaacaacttttacaagatttcttcaatgggaaggagctctgctagagcatcaaccctgatgaggcctgtgcatacggtgctgcagtccaagcttgctatattgagtggtgaaagtaatgagaaagtgcaagattctttgctcttggatgtcaccccattgtctcttcggtttggaaaccgcttgttggtgttaatgaccgtttttgatttc

SEQ ID NO: 52255 - DNA, 368 bp, Gossypium hirsutum
  Clone ID: LIB3197-052-Q1-M1-A1
ggaaaaccctagaaaccagcggctctttcttcaattttcgcttctttaggcggcggtaactcagaggtcgttttcttcttcttcacaagacacaatggcagatggtcatgaaactgacaagaacatcgagatttggaaaataaaaaagctaatcaaggcactagaatctgccaggggaaatgggaccagcatgatatctctcattatgcctcctcgtgatcaaatatcccgtgtcacaaagatgttaggtgatgaatttggaactgcatcgaacatcaaaagtagggtcaaccggcagtctgtgttggctgccattacttctgctcaacagagggtgaagctctataataagggtccccccaacgggc

SEQ ID NO: 52256 - DNA, 434 bp, Gossypium hirsutum
  Clone ID: LIB3197-052-Q1-M1-A10
agagaagcgtcttttggcagtcgccaaaggatcatcgttcgaatcatttcattgctcactctcatcgatcaaaaatttatttttaaaaccccactcccatcctttaaatcctaacactagagaagacaactgaaacgcaaagcagagatccccctaaatttgctttcttctcaaagttttttctttcatctctgcttcatggctcagtctactgtatcccaggtttctgtagctgttcccgttggaaacgacatttctctgaggagatctgtagctaacaggaacattataagctttggtaacaagtcatgggcttccaccttggcttttgatttgaaatcacgaaatgcacagaagaacaaaccgtacatagtatgcctgtcagtgcaacaagccagcaaatccaagattgcagtttcacctttggagttgga

SEQ ID NO: 52257 - DNA, 438 bp, Gossypium hirsutum
  Clone ID: LIB3197-052-Q1-M1-A11
agagaagcgtcttttggcagccgccacgggatcatagccagaatggtttcatcgctcactctcatcgaacaaaaatttatctttaagaaccccacgcgcatcctttaaatcctaacactagagaagacaactgtgacgcagagcacagatccacctagatttgcgttcttctcaaagttgtgactttgatctatgcttcatggctcaggctactgcatgccatgtttttgtagctgttcccgttggaaacgacatttatctgaggagatctgtagctaacaggaacattattagcttcggtaacaagtcatgggcttgcaccatgggctttgatttgaaatcacgaaatggcgcggaagaacaaaccgtacatagtatgcctgtcaggggcacaagccaccgaagccaagatgcaggtgcacctttggaggtggaaat

SEQ ID NO: 52258 - DNA, 413 bp, Gossypium hirsutum
  Clone ID: LIB3197-052-Q1-M1-A12
tttcgatccacatcggtcaggccggtatccaggtcggaaacgcttgctgggagctttactgtctcgagcatggaatccagcctgatggtcagatgccaagtgacaaaactgtcggaggaggtgatgatgcttttaacacctttttcagtgaaactggtgctgggaagcacgtccctcgtgccgtcttcgtggatcttgaacccactgttattgatgaagtgagaactggtgcttaccgccagctcttccacccagaacaactcatcagcggcaaggaagacgcagctaacaactttgcccgtggtcactacaccattggcaaggagattgtcgacctctgtttggaccgcatcaggaaacttgctgataactgcactggtcttcaaggattccttggtttcaacgctgttggt

SEQ ID NO: 52259 - DNA, 413 bp, Gossypium hirsutum
  unsure (1)..(413): unsure at all n locations; Clone ID: LIB3197-052-Q1-M1-A2
cccacgcgtccgccgtgagcatgctctccttgccttcacccttggtgtcaagcaaatgatttgctgctgcaacaagatggatgccacaacccccaagtactcaaaggcaaggtatgatgaaattgttaaggaagtttcttcttacctgaagaaggttggttacaaccctgagaagattccattcgtccccatctctggttttgagggtgacaacatgattgagaggtccaccaacctcgattggtacaagggtccaaccctccttgaggctcttgaccagatcaatgagcccaagagaccctctgacaagcccctccgtctcccacttcangatgtctacaagattggtggtattggaactgtcccagtgggtcgtgttgaaactggaatcctcaagcctggaatggttgtac

SEQ ID NO: 52260 - DNA, 394 bp, Gossypium hirsutum
  Clone ID: LIB3197-052-Q1-M1-A3
ggggaagagctaatggaaaaaagtgaaaagggtaatggtgttgctcctgctacaaggtctccaatggctttaatggggtcatctataaatgaaaaccaagaagtgaataccagcatgagaactgccgagaccatgctgcggttggtgcctatggctttaggggttgctgcacttgttgtcatgctcaaaaactcacagtccaatgactttggctccgtttcatactcagatcttggtgctttcaggtacttggtgcatgctaatggtatttgtgcaagctattcccttctttcagctattatagcagctgtgcctagtccttctactatgcctagagcttggactgtcttcctactcgatcagattctaacatacgtaatctttggagctgctg

SEQ ID NO: 52261 - DNA, 433 bp, Gossypium hirsutum
  unsure (1)..(433): unsure at all n locations; Clone ID: LIB3197-052-Q1-M1-A4
ctattcttcacaaaaaagaaaagaaaaattacagtgaaaatggcaacccttaaagttccagctcatgtacctgccccttctgaggatgctgagcaacttcgtaaagcttttgaaggatggggtacaaatgagcaattgattatcgacattttggctcacaggaatgcagctcagcgcaatttgattcgtaaaacttatcgtgaagcttatggggaagatctccttaagtctttggatgaggaactttcaagtgactttgagcgagctgtggtgctgtttactttggaccctgcagagcgtgatgcatttctggctcatgaagctacaaagaggttcacatcaagccattgggttctcatggaaatngcttgcactaggtcttcacatgaactgttcaatgtgaggaaggcgtatcacgatctttacaagaaat

SEQ ID NO: 52262 - DNA, 428 bp, Gossypium hirsutum
  Clone ID: LIB3197-052-Q1-M1-A5
ctgataactgcactggtcttcaaggattccttgttttcaacgctgttggtggaggtaccggatcaggtcttggttctctccttttggagcgtttgtctgtcgattatggcaagaaatccaagttgggtttcactgtctacccatctcctcaggtctccacttctgttgttgagccttacaacagtgttctctcaactcactcccttttggagcacactgatgtggctgttctccttgacaatgaagctatctacgacatttgcaggcgttctcttgacattgagcggcccacctacaccaatcttaaccgtcttgtctcccaggtcatttcctccttgactgcctcactgaggtttgatggtgccttgaatgtcgatgtgactgaattccaaaccaacttggttccctacccaagaatccacttcatg

SEQ ID NO: 52263 - DNA, 353 bp, Gossypium hirsutum
  Clone ID: LIB3197-052-Q1-M1-A6
atttggctactattcccatcaccggaactggtattaaccctgctagaagcttcggcgccgccgttatttacaacaacgacaaggcttgggatgaccaatggatattctgggttggaccaatggtgggagcacttgcggcggcagcatatcaccagtacatccttagagcggcggctattaaggctttgggatctttccggagcaaccccagcaattaaaagctaaaaagagaagaaaaccacaatatgtttgtctcattgtgtttataatgtttcttcattgttggttcctgtgtttgtattgtattatgattgatgattattaattcagaccttcttatttataattcttta

SEQ ID NO: 52264 - DNA, 349 bp, Gossypium hirsutum
  Clone ID: LIB3197-052-Q1-M1-A7
ggaaaaccctagaaaccagcggctctttcttcaattttcgcttctttaggcggcggtaactcagaggtcgttttcttcttcttcacaagacacaatggcagatggtcatgaaactgacaagaacatcgagatttggaaaataaaaaagctaatcaaggcactagaatctgccaggggaaatgggaccagcatgatatctctcattatgcctcctcgtgatcaaatatcccgtgtcacaaagatgttaggtgatgaatttggaactgcatcgaacatcaaaagtagggtcaaccgtcagtctgtgttggctgccattacttctgctcaacagaggttgaagctctataat

SEQ ID NO: 52265 - DNA, 383 bp, Gossypium hirsutum
  Clone ID: LIB3197-052-Q1-M1-A8
gttcctcaatctctctaatcctcgctttcttccccatcaaacacaccttcgattttcccaaggttgtagaagatggcagaaggtgaggatattcagccacttgtttgtgacaatggaactggaatggttaaggctggatttgctggggatgatgctccccgagccgtattccctagcatcgttggtcggccacgtcacaccggtgtgatggttggcatgggccagaaagatgcatatgttggtgatgaagctcaatcaaagagaggtattttgactttgaaataccctattgagcatggtattgtgagcaactgtgatgatatggaaaagatttggcatcataccttttataatgagcttcgtgttgccccggaagagcaccc

SEQ ID NO: 52266 - DNA, 431 bp, Gossypium hirsutum
  unsure (1)..(431): unsure at all n locations; Clone ID: LIB3197-052-Q1-M1-A9
ccaaacctgtaaactgtgattgccaggtatcatctactaatcaatgacatcaggaatgacttccaacttgatagatttaccttttgactagttttatgtatgtcttaaaatttaacctcagactcattgtttctggtagtactttggtgctgctttaattggaataaagtttccttgcaggatgtgtcctagtgcagatgcaactacttcagtgttggcaggtgacctgctcttgtcgttgttgtcagcttgaagttatttaatcaaacaggaaatgatattattatgtagaggtattggtgggttgtctcactctttctgtggcatcagatgtaactgtataagggatttttatgattggttttctttttttgaaagatttcccaaaagaaaagcanaattgaagtgtgaaaacttgtacgtgataaact

SEQ ID NO: 52267 - DNA, 426 bp, Gossypium hirsutum
  Clone ID: LIB3197-052-Q1-M1-B1
cggacgcgtgggttgtcgtacacgttataatggtgatgcagaccagcatcaacgtcgcaaaaagttcacttttcctgcccgtctattatgtggggattgttttgaggtgcgtcttgataaagttttggcaaatgatgctccttttgatatctgcagttgccagtttgcaatgcattattcctggtctacagaggcacgtgcacgtctggcgctggctaatatatcagctttacttcgtccgggaggcacattcatcgggacgatgccagatgccaatgtgataatcaaaaagcttcgagaagctgaaggaatgacttttggcaacagcgtttactggatacaatttgatgaagaattttccgataaaaaaattaaatcttcaagccccttggtatcaagtacaagtttcacttaaaagatggctgt

SEQ ID NO: 52268 - DNA, 414 bp, Gossypium hirsutum
  Clone ID: LIB3197-052-Q1-M1-B10
actcaatgatgtctacaacacacttgctagtattcctacttggagtggtgactctcaccactcccacatttggtacctatgagtcaccaaattatgggaaaccccctactcctgtattcaagcctcccaaggtgaaaccaccaccatatgaacctaagccaccagtgtatgaaccaccaaaaaatgagaagcctgaacctaacccaccgttttatgcacctccaaagaaagagaatcatggaccctaaccaccaatgtttgaacctccatagaaggagaagcctgtgccaaagccaccagtttatacaccttcaaagaaagaggagcctaaacctaaaccaccattatatgaaccttcaaagaaggttaaacctgagccaaaaccaccgattatacaccttccaagaatgataa

SEQ ID NO: 52269 - DNA, 453 bp, Gossypium hirsutum
  Clone ID: LIB3197-052-Q1-M1-B11
ctcatggtcaaaggatagaagtcagaaatttaaatctgattatgtggatgaaatgcaaggtcgtacgcctttatgtaaggtaaaacctaagaatggcagaaataattttcaggagaggcttggagttaagtctaatggaagtgagaatagatctgttgatgataacaaagaatctatgggaaaactatccagtgagagtagtaaaagagaaaatcaaagaaatgttggtcagtcagatgctaaacctgatgaaactggaggtcaagatgtaatgtgcactgtgaagaagagtatcatgcaggatggcaatgttaaaaaatatatgaaaagattccattctgacaaatctgatcatgcggaaattgcttctgggagagggaactcaccatcattaccacccttcggaggaactcaaaatgagatactgactcattgcccccaccctaatgggtc

SEQ ID NO: 52270 - DNA, 399 bp, Gossypium hirsutum
  Clone ID: LIB3197-052-Q1-M1-B12
gaggaatttaggtgatgaaaagccagcaggagaagaggatgctagagatgctaacaaggagagtgcttcaaacgagcctgaagaaaaagagcccgaggataaggagatgactcttgaggagtatgagaaggtgctggaagagaagagaaaggctctgcaggctctcaagatcgaggaaagaaaagtagatgccaaggagtttgaatctatgcagcagctttcaaacaagaagagtaatgatgaggtcttcatcaaattgggatctgataaagataagagaaaagaggcttatgagaaagaagagagagcaaaaaagtctgtcagcattaatgaatttctgaagccagctgaaggggagaggtactataatccaagtggacgtgggcgcggtcgtgggcg

SEQ ID NO: 52271 - DNA, 400 bp, Gossypium hirsutum
  Clone ID: LIB3197-052-Q1-M1-B2
cccacgcgttcgggagaaaagagcaagcgagaggttttcatttttctacgaacacaaaaaaacctcgtaattagctcaaattgattcgaattaaaagactcagttgctgcattgttacacgattattgaaatcgtaggttcaaatctttcatttcgctgaaaattccaggttgaaatagttctagttcagatcaaagcagttaaacaagtggagaagatctctccgagcagtattttgtcgaattttctcgaggaaattttctggaatctgaagtcgattgtttgataagctttcggaatttgaatgctatgttaatgtggctccgatctcagctcgaggcccgaaattttcccgtgggaaatcactttctcaaagtgtagtggatctgataaaagcata

SEQ ID NO: 52272 - DNA, 418 bp, Gossypium hirsutum
  Clone ID: LIB3197-052-Q1-M1-B3
ccctgcttatacactacttggaaagctggacgcctgctgaccgcccggtttcgcgggacgccaccgacgcgcgcttacgaatgcacagatcaaaacgctgactgggatacgaacatggtgtccttcgttcagatccggctcacagaattcattctgagccgatcgatcacttcaaccgtcttaccgattctcttatccctttagtcttgaacaagatcggtgacgttactgctctcggccgatgctgcgacggatagcgtcgataccgcaccctagctcctcaagtcatgaacgtcctacatcggatcaactgtgttatctctgacgacgattgttccccttcttcgtgttcctacgatgagatacgcgcgcgcggtccgatttctaacatcgttacgatccttcttggaggcattgt

SEQ ID NO: 52273 - DNA, 450 bp, Gossypium hirsutum
  unsure (1)..(450): unsure at all n locations; Clone ID: LIB3197-052-Q1-M1-B4
cctgtatcatgctctgattatgcatgcatgtttagcatatggggttccgagaaacgttaacaagctattttccttaatgcagaaggcttcctatactgttggaggacaatcagtgagtgcagtagacattgaatgcactgttctaaaaatgaaccctgctacttatcatccacaaattgctgcagctgttgcacttcaaaaattcaactcttctaacgagcagaaaaagtatacaattgatcatgctgagcctcttctatattttgctttaagttgtgggctacattcttcgccggcggtgaggattttcagccctcaaaatgtgaatgagttgctaaaaaggtcaatgaaagattacattcaggcaactgttggtataagtaacaaagggaaactactggtacctaaatngctgcattgtttgccaaaggagttatcgaagactcactt

SEQ ID NO: 52274 - DNA, 449 bp, Gossypium hirsutum
  Clone ID: LIB3197-052-Q1-M1-B5
ctgaaacacaaatctcgctttcggaaaagcctcaaatggcagaccaaccgcagatttatgaactcaacaatggaaccgtggttgttaagattaccaactatggctgcactatcacctcattgtctgttcctgacaaaaacggtaaattagccgatgtcgtcctgggattcgacactgtcgaaccgtacgtgaaaggtgcttcaccttattttggatgcattgtgggaagggttgcaaacaggataaaaaatggcaagtttactcttaatggaacggggtactctttgccaatcaacaagcctccaaacagtctccacggtggattcaagggttttgacaagagaatatgggaggtagcagaatataagaaaggcgacaaaccctccattacttttaaatatcgcagcagcgatggtgaggagggttaccccggtgatgtttctgtgact

SEQ ID NO: 52275 - DNA, 405 bp, Gossypium hirsutum
  Clone ID: LIB3197-052-Q1-M1-B6
ctgattttgctctgtcatgatttgaatttttgttcaatattccttttactttccttcaaatctctccaatctccaccgctacttacaccacttcggccaccgccgcgaatttccgatttataatgtgtatgtattaattggtacatagaacgatttgggaatatttaagataaggttttcgatttatcttgatttatttgtaaaggaaaagggaaaaaggaaaagaaaataaaagatggacaagtacgagctggtgaaagacataggatctgggaactcctgcgtagcgaggttgatgcgtaacaaagaaaccaaagaactcgtcaccatgtaatatatcgaccgtggacaaaagattgatgagaatgtggcaagggagattataaatcatatatcactacgtca

SEQ ID NO: 52276 - DNA, 203 bp, Gossypium hirsutum
  Clone ID: LIB3197-052-Q1-M1-B7
tacacttatagctgaaacagacaaggggggggcttctgtttaattaaaacaaaccattgagatggtccctgcggatgctcacgcaatgtgatatatgtccagtgcccgtgtttgtgcaagagtatagatataaccaggcccgatttatcattttgagtaacaatgactgttttaaaatttccaaatgccatctcatctaatta

SEQ ID NO: 52277 - DNA, 387 bp, Gossypium hirsutum
  Clone ID: LIB3197-052-Q1-M1-B8
gaaggagaggaaggtgaaactgctactgaggaagtgaagaagagcaaccatgtcttgaggaagctggagaaacggcagcagagtcgcacacttgactcccatattgaggagcaatttggtagtggtcgtttactggcttgcatctcttcacggcctggtcaatgtggccgtgctgatggatatatcttggagggcaaagagctggagttttacatgaagaagatacagagaaagaaggggaagggagctgcctaaaattttgttgcttttaagtatttcattattgagatcaaaatgtcctttttttttttgccttactttcaccatttgagaacatttgaaattgtgttagttttgagatttttttttgtttgaatgttaattagt

SEQ ID NO: 52278 - DNA, 428 bp, Gossypium hirsutum
  Clone ID: LIB3197-052-Q1-M1-B9
actcaatgatgtctacaacacacttgctagtattcctacttggagtggtgactctcaccactcccacatttggtacctatgagtcaccaaattatgggaaaccccctactcctgtattcaagcctcccaaggtgaaaccaccaccatatgaacctaagccaccagtgtatgaaccaccaaaaaaggagaagcctgaacctaacccaccggtttatgcacctccaaagaaagagaagcatggacccaaaccaccaatgtatgaacctccaaagaaggagaagcctgagccaaagccaccagtttatacacctccaaagaaagaggagcctaaacctaaaccaccagtatatgaacctccaagaaggagaaacctgagccaaaaccaccgatttatacaccttcaaagaagagaaacctgacccaaacca

SEQ ID NO: 52279 - DNA, 437 bp, Gossypium hirsutum
  unsure (1)..(437): unsure at all n locations; Clone ID: LIB3197-052-Q1-M1-C1
gcgttcaattcctcatttcaagggagagagtgtatcagtgtttcttgccctcttttacttaatttctctccgccatggctctctccgtcgagaaaaccgccgccggccgtgagtacaaggtcaaagacatgtctcaggctgacttcggtcgtctcgagatcgagttagctgaggttgaaatgcctggtttaatggcttgtagaaccgagttcggccctgcccaacctttcaaaggagccaaaattactggttctcttcacatgaccatccaaaccgccgttcttattgaaacccttaccgccctcggagctgaagtccgttggtgctcttgcaacattatctctacccaagaccacgctgccgctgccatcgctcgtgactccgccgctgntttcgctcggaaggggagaccctccagaatactggggtgtactgag

SEQ ID NO: 52280 - DNA, 378 bp, Gossypium hirsutum
  Clone ID: LIB3197-052-Q1-M1-C10
attgttatctctgaaggtgtattaataaacgccttcaatttaccttcaatttccatttacttctctattgctacgtctttgaatttctagtgagcgaaaatgagagagtgcatttcaggccacatcggtcaggctggtattcaagtcggaaatgcctgctgggaactctactgccttgaacatggaatccagcctgatggccagatgccaagtgacaagactgtccgaggaggtgatgacgcttttaacacctttttcagagaaactggtgctggaaagcacgtgcctcgtgctgactttgtagatcttgagcctactgttattgatgaactgaggactggtacttaccgacagcttttccaccctgagcaactcatc

SEQ ID NO: 52281 - DNA, 435 bp, Gossypium hirsutum
  unsure (1)..(435): unsure at all n locations; Clone ID: LIB3197-052-Q1-M1-C11
cccacgcgtccgcacacttgctagtattcctacttggagtggtgactctcaccactcccacatttggtacctatgagtcaccaaattatgggaaaccccctactcctgtattcaagcctcccaaggtgaaaccaccaccatatgaacctaagccaccagtgtatgaaccaccaaaaaaggagaagcctgaacctaagccaccggtttatgcacctccaaagaaagagaagcatggacccaaaccaccaatgtatgaacctccaaagaaggagaagcctgagccaaagccaccagtttatacacctccaaagaaagaggagcctaaacctaaaccaccagtatatgaacctccaaagaaggagaaacctgagccaaaaccaccgatttatacacctncaaagaaagagaaacctgaacccaaaccacccgtatatg

SEQ ID NO: 52282 - DNA, 423 bp, Gossypium hirsutum
  Clone ID: LIB3197-052-Q1-M1-C12
ctaaactccattccccttaacctcactaaaaccctaaaccctttgaagcaaacctacccccatggcttcaatcaacttcaatcccttcgaaagttggttcaggaaacctcaaaacccaatccaacccatcaaccttctctcactcgctcactcattccgctccaaaacattctcttactctaccaatttcgcttctataaacttctccagccccttcaacaaaaaacccaagaaacccgactcggattccgatacacccggaccgtacaagcagatgctggaccagttcttttgggaatgcgagaacctccctgattacaggcacactccggaggtcgaaaagattttggatgaggaccccgttttcgagaagaaagagaatccaacagaagaggacattaaagagaatgaagaatggtggcg

SEQ ID NO: 52283 - DNA, 419 bp, Gossypium hirsutum
  Clone ID: LIB3197-052-Q1-M1-C2
atttgacaaacaatggccggaatcggacctttaacccaagactgggaacccgttgttattcgtaaaaaagccccaaccgccgccgccaagaaggatgagaaagtcgtaaacgccgctcgtcgtgctggtgccgagatcgaatccgtcaaaaaatcaaatgctgggacgaacagggccgcatcaagtagtacatctctgaacacaaggaagcttgatgaagaaactgaaaatcttgctcatgatcgagtgccaaccgaactgaagaaagccatcatgcatgctcgaatggaaaagaaacttacccaagcacaacttgctcagttgatcaatgagaaacctcagatcatacaagagtacgaatctggaaaagccattcctaaccaacagataatcggtaaactcgagagggctcttggtgc

SEQ ID NO: 52284 - DNA, 338 bp, Gossypium hirsutum
  Clone ID: LIB3197-052-Q1-M1-C3
ccgggtcgacgccacgcgcgcgacctttgctatttttattatctccctcttgtctttccctgcttcgattggatcaaatacaccgccatgcgagacaacgaagttgttagagtgagaacatatgctcttgtatacgttttaatagggatcaatacaggtgtattagttgttaacgatccagcttgatacatgctttgctgctttgactatccgaagctagccggagtttttccatggatggaaattgttattccatctttttctccgtttaaaaataacatgaaactgtagatctttatgatccttctggacgtgaccgaccatatgatgtgtatgaa

SEQ ID NO: 52285 - DNA, 446 bp, Gossypium hirsutum
  unsure (1)..(446): unsure at all n locations; Clone ID: LIB3197-052-Q1-M1-C4
agctgctgttctctctctctctctttcccatagtttcacccatcttttaatccatcgctcacaaaattatgggtttgaaggaggaattcgaggagcatgccgagaaagttaagaccctcccggccgccccttcgaatgatgacatgctcattctctatggactgtacaagcaagctactgttggaccagtgaataccagccgtcctggaatgttcaacatgagggaaaagtacaagtgggatgcatggaaggctgttgaagggaaatcaaaggaggaagcaatgggggattatatcaccaaagtaaaacaactgtttgaggctgctggaagttcttgatgtgtgtgtgtatgaccaatgaaactggtgtaatttcaagcccttgtcggttacttggggttntcattactatgaaataaatatgtactcnttttctattgctattat

SEQ ID NO: 52286 - DNA, 454 bp, Gossypium hirsutum
  unsure (1)..(454): unsure at all n locations; Clone ID: LIB3197-052-Q1-M1-C5
caaaataaaaataaaaataaaacaaaagggagactccctttctctgctaggccgacggcctcccaagacctccgtcgcgccaccaacgtgttcggcgaccggtgccggaaagtggtcccgttagcccctgtttcacggtatccttgaaagccaaagctctctcaacccacgggagtcgaaaacaaaggaggtccacgaccgcttggacccgattcgggcgacggaggagagatcctccgacggcgcaaccacggccacccggtgtcagacgaggccgacggctgtggtcagaagcgtgcatgagtgagcctggcagcatgcggcgcttggaggcttgngggcaagcagcagctagggttctctgttgctgaaattttttaatttcctgggctagggtttaggtttgttgtgtttaatgtaactggactgattattttttggtaatttgggctgg

SEQ ID NO: 52287 - DNA, 436 bp, Gossypium hirsutum
  unsure (1)..(436): unsure at all n locations; Clone ID: LIB3197-052-Q1-M1-C6
aaaaaatcttgaaaatatttcacaaacccttgttcctctcagtccattcggaggcttcatcggcgccgaatgcgcctccaccatcaacgcgattttaattagatcctaaaggatctaataacccttggaccggagaagtgaacaatgaataaattgaccccaaatccattattatgtttagctaaccgagaagaagaggctcaagtgataaggaaaagctaagcaggtgtaatcagtactagctctcacgtattttgttgaggttcgaccggattgtacgaagaatgtatacgcatgatattggttntgcaaaggttcacgtggattgtatggagaatatatataaacatgacatttggttttatggaggttcgattggattgtacggagatacttgtgcatatttatatgataaccctacatgggttctttcaag

SEQ ID NO: 52288 - DNA, 171 bp, Gossypium hirsutum
  Clone ID: LIB3197-052-Q1-M1-C7
ggcatttaatacaagtatagcataagtgggggttgtccaattgacagttcgcagttgctttatttgcgaagaccccacatcggaacaagataaagatgtgcccagcgctatcactctgcactaaaactaactggatgacctattcacctaatagagggtaactgttacttc

SEQ ID NO: 52289 - DNA, 446 bp, Gossypium hirsutum
  Clone ID: LIB3197-052-Q1-M1-C8
cttcttcagtctgctcagcttaagccagatgtaactattacatctgcagattcagataatgacatagaggactctgatgatgaaagtatggaaaccattacgcttggggacaaaagaattgggatcaagacaagtgttctggaggagaaggctacagcatgtaacatgctatgttgctatgccgatgagttgaaggaagggttttttccatggattgatcaggttgctccaactttagttcctcttcttaaattttatttccacgaggaagttagaaaagctgctgtttcagccatgccggagttattgcgttctgcaaaattagctgtggagaagggaatggctcaagggcgtaatgagacctgtgtgaagcaattgtctgattacattattccggctcttgtggaggcattacataaggaacctgatacagaaatatgtgcaag

SEQ ID NO: 52290 - DNA, 443 bp, Gossypium hirsutum
  Clone ID: LIB3197-052-Q1-M1-C9
cttcatcagaaatcaaaaggagtaaacctcagattccaaatcggaaaaagaaaaatggtgaagggacgccaaggggagcgagtcagactctatgtaagaggaaccatcttgggttacaagaggtcgaagtcaaaccagtatcctaacacttcattaatccaaattgagggagttaacaccaaagaggaagtagcttggtatgccggcaagcgtatggcttatatttacaaggctaaggtgaagaagaatggttcgcattatcgctgcatttggggcaaggtaactagaccgcatggtaacagtggtgtcgttcgtgctaagttcaagtctaaccttccccctaaatctatgggagatagagtcagagtcttcatgtaccccagcaacatttgagttgtctaaatgcctgacggcattcgatcgatgactcaagtgactgtgcc

SEQ ID NO: 52291 - DNA, 393 bp, Gossypium hirsutum
  unsure (1)..(393): unsure at all n locations; Clone ID: LIB3197-052-Q1-M1-D1
cccacgcgtccgtaacaatcgctgttgtgaacaaacaaacgcagacttgagcttcaatggcggtgaaaatcttgatagcgtcaatcttagtaattgcagcatctctttgctgggtatcgtcggctgattcgtctgaagctgctttcgtcaaaaagaccatctctgcccacaagatcgtcatcttctcaaagtcctattgcccgtactgcaggaaggcaaaatctgtgttcaaggagttgaaacaagttccattcgttgtggagcttgatgagcgagatgatggatggaatattcaggatgccttgagtgagattgttagtaggcgtactgtaccacaggttttcattaatgggaaacacatcngggggtcagacgatactgttgaagcatatc

SEQ ID NO: 52292 - DNA, 447 bp, Gossypium hirsutum
  Clone ID: LIB3197-052-Q1-M1-D10
cttttagattccctttccattgcactgctctttctttctatagaattagtcactcctgttctagatgaaggttctctccccaattcttgcttgcctagcgcttgctgtggtggtaagccatgctgctctctcacctgagcaatattggagctataagctgccaaatactccaatgccaaaggctgtcaaagaaattctacatccagaactgatggaggagaaaagcacctctgtaaatgtaggaggtggtggtgtaaacgtcaatacaggaaaagggaagcctgtgggtgacacccatgtgaacgttggaggcaatggagttggagtgtacacgggaaagccagggggtgacactcatgtgaatgttggagacccttttatatacctatattcaggcagtgaaactcaaattcatgaagacccgtatgtggctcttttctttctgga

SEQ ID NO: 52293 - DNA, 427 bp, Gossypium hirsutum
  Clone ID: LIB3197-052-Q1-M1-D11
caaaaatggatggttattgtagcagaagggtaatcatgtttttggtgtttgcatttgcagcaataagcagagggtatggacaagaatcaaccactcttgttcctgcaatcatcacctttggtgactctgtggtagatgtgggcaataatgactatctccctaccatcttcaaggctaactatcctccttatggacgggactttgccaacaaaaagcctactgggaggttttgcaatggaaaattagccactgacatcactgctgaaactctggggtttacaacttatccaccagcttaccttagcccagaagcatcagggaagaaccttctgcttggagccaattttgcttcagctggctctggctatgatgacaaagctgccatggtgaatcatgccatcacattgacccaacaattagagtattt

SEQ ID NO: 52294 - DNA, 400 bp, Gossypium hirsutum
  unsure (1)..(400): unsure at all n locations; Clone ID: LIB3197-052-Q1-M1-D12
atctctcacctccagcctctcacgctctcctcagctctctcatctcctggaaccatggccagcacatccaccaccatcaggagccacagcagcagccgcaggggcttcagtgccggctcagccaggctccctggggtcagccgctctggcttcagcagcgtctccgtgtcccgctccaggggcagtggtggcctgggtggcgcatgtggaggagctggctttggcagccgcagcctgtatggcctggggggctccaagaggatctccattggagggggcagctgtgccatcggtggcggctatggcagcagagccggaggcagctatggctttggtggcgccgggagtggatttggtttcggtggtggagccggcattggctntggtctgggtggtggag

SEQ ID NO: 52295 - DNA, 421 bp, Gossypium hirsutum
  Clone ID: LIB3197-052-Q1-M1-D2
ctttctacaagcatatattggatgttaaagttacttaccatgacattgaagcgattgaccctgattacttcaaaaacctgaagtggatgcttgagaatgatattagtgatgtcctagaccttacttttagcattgatgctgacgaggagaagttgatattgtatgaaaggacacaggtgactgactatgagctgattcccggtgggcggaacattaaagttactgaggagaataaacaccaatatgttgatttagttgctgagcatcgtatgacaactgctattcgtccacaaatcaatgcatttttggaaggattcaatgaattaattgccagggaagtaataactattgttaatgacaaggagctggaattactgataagtggtcttacagatattgatatggatgatatgagggcaaa

SEQ ID NO: 52296 - DNA, 407 bp, Gossypium hirsutum
  Clone ID: LIB3197-052-Q1-M1-D3
gtgcgcacccagtgggcttcacctggttgccttcattctccacgtttctcgacaaggtcagttaagattgcagtttgcgtgaaatttcctgcaactataaaaactctcttactcaaacaaagctttgccttaactcgccttctcaacccgccccactcgctttcaatgtctttctctagctccagctgcatggatggatcttatgctgagattgtggtggtgcgacatggagaaaccgagtggaatgctgatggaagaattcaggggcacctggatgtggaattaaatgaagctgggaaacagcaagcagctttagtggctgatcgtttatcaaaagagcctaagatatccgctgtatattcatctgatttaaagcgagcccttgtgacagctgagacaattgcagc

SEQ ID NO: 52297 - DNA, 394 bp, Gossypium hirsutum
  Clone ID: LIB3197-052-Q1-M1-D4
cggacgcgtgggttttttttttttttttttttttttttttttttttttttttttttttttttttttttttttttttttttttttttttttttttttttccccccgaaaaattttggttgtttttaccccccccccaaaaaaaaaggggccccccttttaaaagaaccaatctttccccccccggcctgcaaagtaattttttttttatggggccccccaaaataaatccccccgcccgtttttaacaacggggggggggaaaaacccctggcgccccccaaattaaccgctttgaaaaacccccccctttccccgggggggttaaaaaaaaaaagccccccccctttccccctttccaaaagtttcgccccctgtgtgggtaaggggccccccc

SEQ ID NO: 52298 - DNA, 443 bp, Gossypium hirsutum
  Clone ID: LIB3197-052-Q1-M1-D5
cccacgcgtccgcccacgcgtccgctttttttctctctcaaatttactactactctcttagctctcctctgtttcagtctcctttttatttccataatacgatcacaatttttttctcatttattttttattttcacttcattttttctcagctttaacaaatagagaagaaaaagattcaagtcatttataccttatggaatatgatacagagaaaacatgtagagaattcaagccaatcgataacatttcatcacctacctgttcttcttcgtttcagaaacttctgttttttgaccggccatgggaaagaaagggagtggatggttctcgacggtgaacaaagtgttcaaatcttctcacatagacttgcctgacaaaaaaagagagattaatgtggagaaatggccaaatgatgccccggatgtaatgtcgtttgaaca

SEQ ID NO: 52299 - DNA, 453 bp, Gossypium hirsutum
  unsure (1)..(453): unsure at all n locations; Clone ID: LIB3197-052-Q1-M1-D6
cagaatttaaggaaatggtttttcaattcaattttctagttcttctattatgtcttatgtttttaatgtgtggcagaggcaatgcagtaagggatttggaagagaaatatgatcttgaaagccatggcagagacgacgaagtggagagtttagatgacaagtacgttaccgcttactttcatcaaacttttgattctgcaaatcactttgatggaggtgatgaagtgaagaatttagaagacaaatattcagcggcttacttccacaaatcgttagattctggaaaccatggcagagacgacaaagcaaagatattggaagacaattatgctactgcgtacttccacaagacttctgtttttgaaaaccatggtgaaggtgacaaattanagagtttggaagacaaatattccacggcttacttttacaaaacaatatcttccaaaatgatgg

SEQ ID NO: 52300 - DNA, 473 bp, Gossypium hirsutum
  unsure (1)..(473): unsure at all n locations; Clone ID: LIB3197-052-Q1-M1-D7
cgggagtgttaactacatcatcagagatactattgaagtgtgatgcaggaatataactgtatcatatatgagataatgctttaacttgtttggaagtatttatatagcatatataaggggaaacatcatctctggcctatcaataatggccagagacaaagaaagaatattcttggtggaaagaaagctcacgaaaagctgagaaagaaaaggatgtattttgccaacagaaaattatctagatgtgctgagtgtttaggttgtgataagggaaggaacgatgacagaagaaaacttaaaaacctgcttgcagaatggaaatagaggcaggtcaaagtgagccctgaatgtcgttattttaaaatttgaatgtttaaaaattgagagccatgaacatatttganaagtggaacaacttttctaatctgtaattgagaaataacttangaagcatttaagggatatattaaagg

SEQ ID NO: 52301 - DNA, 332 bp, Gossypium hirsutum
  Clone ID: LIB3197-052-Q1-M1-D8
gtcactcgtttgttcttctccgtttcacttgtgggcttcaaacagtctgaaatctaactttccccagttcaattcctttccggtttcaaatagagagatactgaatatttgtcaacgcttgactttgtacggatcaaaaaggggggggggcatagagattagtgttgatcgaagaaccgagtttatttgtttaaggggcaagggaacaattggtaatatatctatctgatggtggcaaataattaagtcaatcatcataacctgacaaattctagggacaagagtgctcattgtttccggacagtttacaaagtgggtccatacacgaggtt

SEQ ID NO: 52302 - DNA, 445 bp, Gossypium hirsutum
  Clone ID: LIB3197-052-Q1-M1-D9
cttttagattccctttccattgcactgctctttctttctatagaattagtcactcctgttctagatgaaggttctctccccaattcttgcttgcctagcgcttgctgtggtggtaagccatgctgctctctcacctgagcaatattggagctataagctgccaaatactccaatgccaaaggctgtcaaagaaattctacatccagaactgatggaggagaaaagcacctctgtaaatgtaggaggtggtggtgtaaacgtcaatacaggaaaagggaagcctgggggtgacacccatgtgaacgttggaggcaaaggagttggagtgaacacgggaaagccagggggtggcactcatgtgaatgttggagaaccctttaattacctatatgcagccagtgaaactcaaatccatgaagacccgaatgtggctcttttctttctg

SEQ ID NO: 52303 - DNA, 436 bp, Gossypium hirsutum
  unsure (1)..(436): unsure at all n locations; Clone ID: LIB3197-052-Q1-M1-E1
gcaaaatcataaagctctcacaagtttcgaattttgctctttagtccctcaatttatatttgaaattcaccaaggttctaaaatgggcactgctcaaagcagggaagatcggatcacggattcagaatccgatgaagactatgaagaagaagaagaggaggaggagcaatacgacgacgctttaagcgatcatcaaaacactcaatcttcatcttcaacttcaacttcttcaggtactcaaaaaagcctcgacgatatcgatgctaagctcaaatccttgaaattgaaatacaattctcagcaatcaagccctaatctcaaaaacccagtgaagctttaccttcatataggcgggaacacacccaaagcgaaatgggtaatctctgaaaagctcacttcttatagtttcactaanggaaatgggtgatatgatgag

SEQ ID NO: 52304 - DNA, 448 bp, Gossypium hirsutum
  Clone ID: LIB3197-052-Q1-M1-E10
ataaatcttcagagaagaatttccccttagttctttgcaagaaggtagagataaagacactttttcaaaaatggcaatggtatcagaattcctcaagcaggcctggtttattgaaaatgaagagcaggaatatgttcaaactgtgaaatcatccaaaggtggtcctggatcagcagtgagcccctatcctaccttcaatccatcctcggatgtcgctgccttgcacaaggccataatggttaaaggtgtggatgaagcaaccatcattgacattctaactaagcgaaacaatgcacagcgtcaacagatcaaagcagcatatctccaggaaacaggaaagcccctggatgaaacactgatgaaagcccttatgggtcaccttgaggaggttgtttagctctgctaaaactccacgcattttatgctgatgaactttggctgcatgaag

SEQ ID NO: 52305 - DNA, 424 bp, Gossypium hirsutum
  Clone ID: LIB3197-052-Q1-M1-E11
caaaatatggccaggagaagggttgttttggtgcagattttggcactagccttggccgctgttatgccattgctctcaggaggtgtggatattcaacaagttagggtgctggcagctaaattcaacgtgacttgcgtagtggtattcggagactccagcgtggatccaggcaataacaactatattgctacgccctttaagggtaatttcctaccgtatgggaaagacttcttcagaggccacccgactggacggttcagcaatggaaggctagccactgattttattgctgaagctttgggttacacgaacgaaattcgacctttccttaacaagagattgagaccagttgatatcttgcatggtgttagtttcgcatcagctgcttctggttatgatgagctcactgccaatctctcacatg

SEQ ID NO: 52306 - DNA, 407 bp, Gossypium hirsutum
  Clone ID: LIB3197-052-Q1-M1-E12
ctcgggtaccaaaaatcggggaatcaaatcatcggccattggcaatgctgcgaccaaatgcctctcttggtgctgccctgtcattgttagtgcaagccgaggtaagttcaataccaatagtggatgagaatgacgcgttgattgatatatatgcaagaagcgatataaccactttggcaaaggataaagcttacgcacagattcgtctcgatgacatgagtattcatcaggccttgcagttggagcaatatgcaaactctttcaatggacaaagatgtcaaatgtgtctacaatcggatactttgcacaaagtgatggagcggttggcaaatccagggactaggagacttgtgattgtggaggctggcagcaagcgagttgaagggattatttcattaagtgatgtc

SEQ ID NO: 52307 - DNA, 430 bp, Gossypium hirsutum
  Clone ID: LIB3197-052-Q1-M1-E2
attgttatctctgaaggtgtcttaataaacgccttcgatttaccttcgatttccatttacttctctattgctacgtttttgaatttttagtgagcgaaaatgagagagtgcatttcagtccacatcggtcaggctggtattcaagtcggaaatgcctgctgggaactttactgccttgaacatggaatccagcctgatggccagatgccaagtgacaagactgtcggaggaggtgatgatgcttttaacacctttttcagtgaaactggtgctggaaagcacgtccctcgtgctgtctttgtggatcttgagcctactgttattgatgaagtgaggactggtacttaccgtcagcttttccaccctgagcaactcatcagcggcaaggaagacgctgccaacaacttcgctcgtggccactacactattg

SEQ ID NO: 52308 - DNA, 442 bp, Gossypium hirsutum
  Clone ID: LIB3197-052-Q1-M1-E3
gaggcgtgcgttcgacattggcccaaaaaaagaagtccaaaacaattggagacagcgagacatggcagatccagtagtagcatcacacttgagcttagtgctcaaagctccccccactatttcttcgccttcccaatttttactgcaacaacactcaaagccaatggcttcctctctcaatagcgccgcctctttgcgtctcttcgcttcttcatcttcttcctcttcctccgccgccgctagactttctctccgttccacttccctttctttctcttcttctctcaaatccctcgctttctctactctttctcgccacaagaggggatcggctgtcagtgtgtcgagtaccggagggtttagctctgtagccagtccgaaatgcgctgcttcggatcctgatcagttgaagagtgctagagaagatatcaaggagcttctc

SEQ ID NO: 52309 - DNA, 444 bp, Gossypium hirsutum
  Clone ID: LIB3197-052-Q1-M1-E4
cttttcttttcaatttctttctttatatttatatatttttttgcttgtttagctgcaccaatggcgaccgatgctaaagcagatccagagccgcactgcagagaagacgatgacaacgctcccgccaccgccgcagacgatgaggacaccggtgctcaagtagctcctatcgtcaagctcgaggaagtcgctgtcactactggtgaagaagacgaggatccgattctcgatctgaaggcaaagctgtatcgattcgataaggaagggaatcaatggaaggagagaggagttggaaatgtgaagctcttgaagcacaaagtcaatggcaaagtccgtctagtcatgcgccaatctaaaacccttaagatctgtgctaaccatttcgttattccaacaatgacggtgcaagaacattctggaaatgattaatcatgcgtttggcac

SEQ ID NO: 52310 - DNA, 438 bp, Gossypium hirsutum
  unsure (1)..(438): unsure at all n locations; Clone ID: LIB3197-052-Q1-M1-E5
gcgttggcagccattgaagctctcttccattaccgcgttgtgagagcctatcatagtggtgatttcaacagtttctcaattgctttagaagtggtcttaattgcttacttatactccaatgtcgttgttcttgatactgttgtgagttccatgctcttcaaaagctgcaaaacaggttgtttgatggatgaggaaagaagggattgttacaggattgaaattgtagcagagaaagatggaaatgcttatgtgaagttgacgaatattgaacaacttccatagaaaaaaaaaaaacagccatcaaattgtatggtcttgaatttctgcatatgtaaattcatttcatactgtaattccaagattcattttctgagaaaaccaggcgatttctgagggataagtgatcaaaacatatgggatatangttcaagaatcaag

SEQ ID NO: 52311 - DNA, 443 bp, Gossypium hirsutum
  Clone ID: LIB3197-052-Q1-M1-E6
cgggaagggattgtcggaagatgccaaagcacaaaaattggcttttcaacattggattgaagctattgatccacgccatcgttacgggcataatttgcatatttactatgaagagtggtgtaaagctgatgctggtcaaccatttttctactggttggatttaggtgatggcaaagatattaatcttaacgagtgcccgagatcgaagcttcgacaacaatgcatcaagtatctcggaccccaagagagggtaaattatgagtacattgttgttgaaggaaagattatccataaacaaaccagaaacgtactcgatacaatcgaaggattgaaagaagggaaatggatattcgttatgagcacctcgaagaaattgtatgccggcaagaagaagaaaggaatgtttcatcattcgagtttcttagccgggagagtgacgttag

SEQ ID NO: 52312 - DNA, 421 bp, Gossypium hirsutum
  Clone ID: LIB3197-052-Q1-M1-E8
taaagatcaaagactcaaagagaaagaaagcggccatggagaaggaaagagagcaacaagtttacttggcaaggctcgctgagcaagctgaaagatacgatgagatggttgaggccatgaagagtgttgctaagttggatgttgagctgactgtggaggagaggaatctgttatctgtgggatataagaatgtgattggagcaagaagggcatcctggcggatactgtcttcaattgaacagaaggaggaggccaaaggtaacgaacaaaatgtgaagaggataaaggattataggcaaagggtcgaagatgaactctcaaagatatgcaatgacatactctcagtcattgataagcacctcattccatcttcctccaccggggaatcaactgttttctactataagatgaaaggagatta

SEQ ID NO: 52313 - DNA, 445 bp, Gossypium hirsutum
  unsure (1)..(445): unsure at all n locations; Clone ID: LIB3197-052-Q1-M1-E9
ataaatcttcagagaagaatttccccttagttctttgcaagaaggtagagataaagacactttttcaaaaatggcaatggtatcagaattcctcaagcaggcctggtttattgaaaatgaagagcaggaatatgttcaaactgtgaaatcatccaaaggtggtcctggatcagcagtgagcccctatcctaccttcaatccatcctcggatgtcgctgccttgcacaaggccataatggttaaaggtgtggatgaagcaaccatcattgacattctaactaagcgaaacaatgcacagcgtcaacagatcaaagcagcatatctccaggaaacaggaaagcccctggatgaaacactgaagaaagcccttatgggtcaccttgaggaggttgttttagctctgctaanaactccagcgcaattngatgctgatgaacttcgggct

SEQ ID NO: 52314 - DNA, 448 bp, Gossypium hirsutum
  Clone ID: LIB3197-052-Q1-M1-F10
cggacgcgtgggcctccctttttttttctctaatttagttctctctccgttttcatctccgttcactacgaaaatggcttcccacattgttggatatccccgtatggggcccaagagagagcttaaatttactttggaatctttctgggataagaagagcagtgctgaggatttgaaaaaagttgcagctgatctcaggtcatccatctggaaacagatgtctggtgctgggatcaagtacatccccagcaacactttctcttactacgaccaggttcttgatactacatccatgctcggagctgttccacctagatataactggactggtggtgagatcggatatgacacttacttctccatggctagaggaaatgcctctgtgcctgccatggaaatgaccaagtggttcgacaccaactatcacttcattggtcctgaactcgga

SEQ ID NO: 52315 - DNA, 359 bp, Gossypium hirsutum
  Clone ID: LIB3197-052-Q1-M1-F11
agatgatggaaaggggttttattgttttggccttgacggtggttttcgccgcgacggtggttacggcggctgacgagagtgggttagcgaatgagtgcagcaaagatttccagagcgtgatgacttgcttaagctttgctcaaggaaaagcagcgtcgccgtcgaaggagtgttgtaattcagtggcggggattaaagagaataaacccaaatgtttgtgttatattttgcaacaaacacaaacttccggtgctcaaaatctcaaaagcttaggtgttcaagaagataagctgtttcagttaccgtcggcttgtcaattgaagaacgctagcgtcagtgattgcccaaagcttcttggg

SEQ ID NO: 52316 - DNA, 425 bp, Gossypium hirsutum
  Clone ID: LIB3197-052-Q1-M1-F12
gaaaactcgggggcgatgcttgagtggagattccgagtttcactccatcatctagtcaccggttacgctggccttgtttcagcaaggaaaatagtgcttcctcttacttgcatccaaccaaaagggcttgagagcttaaagcggtcagtgcatacttcgaacgacgatggtgattttgcggaattaggcttaccggtggaaagggttggaggtgtaattgcgaaactgatgacagaaaggcctcaacattttgtgaaaatcaatggtactaaaaagaagttaaatgggtcaccatttaaggaagacagctgccttaacatcaaggatgtatcacttaaagttgggaactcttttgttccttctctagatcttgagaacaatgatagtggaagatctactttcagaacttcaagttctgttacgat

SEQ ID NO: 52317 - DNA, 449 bp, Gossypium hirsutum
  Clone ID: LIB3197-052-Q1-M1-F2
cggacgcgtgggctcttctttcctcctagcccaaaaaaaaaaaaccctctttcctttctctcgttctttttcccgttcaatcatgtcttgcttcattagcaaatatgccgatgagttggctaaaaacgctgcttacattggaacccctggaaagggtatccttgctgctgatgaatccactggcaccatcggcaagcgtctttcaagcattaatgtagagaatgttgaagataacaggcgtgctctccgtgagctcctattcacaactccaggagctcttcagtacctcagtggtgttattctctttgaggaaaccctttatcaaaaaaccgcttcgggcaagcccttcgttgatgttttgaaggaaggtggtgtcctccctggcatcaaggtcgacaagggtacccgtgagcttaacggaaccaatggcgaaactttcacccagggtc

SEQ ID NO: 52318 - DNA, 357 bp, Gossypium hirsutum
  Clone ID: LIB3197-052-Q1-M1-F3
cagacacatggactattctttcctcctagccgagaaaaaaaaaaccctgtttcctttctctcgttcttcctcccgttcaatcatgtcttgcttcattagcaaacactgcgatgagttggctaagaacgctggttacattggaacccctggaaagggtatccttgctgctgatgaatccactggcaccatcggcaagcgtctttcaagcattaatgtagagaatgttcaatataacaggcgtgctctccgtgagctcctattcacaacttcagtagctagtgaggacctcaggggtgttattctctttgaggaaaccctttatcaaaaaaccggtttgggcaagcccttcgttgatgt

SEQ ID NO: 52319 - DNA, 331 bp, Gossypium hirsutum
  Clone ID: LIB3197-052-Q1-M1-F4
tttactccttgccgtactggacaagctgaaatgggatttggagatacaggatatcgtaccattatatccagaaattttgccactctacactcaatctctaccacgccattcactgacatgtggcgagcttacttacttaactccatcaatgacctaaaagatttcgacatgactaatctctacaactattatggctctgacgccaacgataacaagactggctatgcgtacgtcaacgaatccagaatcgacgattgagaataccaacttctatacgccaagagccttaatgctataagaactgatctcgagaatccagaggaccagctcc

SEQ ID NO: 52320 - DNA, 445 bp, Gossypium hirsutum
  Clone ID: LIB3197-052-Q1-M1-F5
atctgctactccttctcgttggcagactttaagcggggaagcacccgttgtcatagctcgtggtggattttcaggaatattttcagactccagttttggagcttatagtttggctttagtaacgggtccttctgatgtgatcttgtggtgtgatgtgcaattaacaaaagatggagccgggatttgctttcctgatcttaagctagataataattctaacattgcaactgtttttacagataagccgaagacttaccttgttaatggggtctctaccaagggacttttttccattgattatactctcaacgatcttggaagtgtttatttaagtcaaggtatctactctcggacgaataagtttgatggaaataattacccaattatgaccgttcaggatacctatactcaactgaaaccgcttggattttggtgaatattcaac

SEQ ID NO: 52321 - DNA, 451 bp, Gossypium hirsutum
  Clone ID: LIB3197-052-Q1-M1-F6
ctaagcaatcgattcaaccagacaagctctcttaaaaatccctttattttccctgtataattcttgtttcttgtctaacgcataagaatggcggccaaagctgaaggcaaggcaattgggattgatctcgggacgacatacagttgtgttggtgtatggcagaatgatcgagtggagattattgccaacgatcaaggcaaccgaacgacaccgtcttacgttgctttcaccgacaccgagcgtctcatcggtgatgctgctaaaaaccaagtcgctatgaacccacagaacactgttttcgacgctaaacgtctgatcggtcgtcgattctctgacccagcggtgcaagccgatatgaagcattggcctttcaaggttgttgccggccctggtgataagccgatgatcgtcgttaattacaagggtgaggagaagcagttcgctcctgaaa

SEQ ID NO: 52322 - DNA, 402 bp, Gossypium hirsutum
  Clone ID: LIB3197-052-Q1-M1-F7
ctcaaatatccgatatcgtctttcccaaaaccagatccaaaagccagtttatttattcaccgatggtcgacgaagccatagtcaaatgcttcgccgccttttcctctggtgatttcaacgccgcaatcaaacacttcaccgatgctataaacctttcccccaccaaccacgtcctttactctaaccgatccgctgcgtatgcttctctccatcaatacgaggccgcattgtcggacgccaaaaggaccgttgagcttaaacctgactggtctaaaggttacagcaggctaggcgcggctcacctcggtttgcaccaatatcaagatgctgtttcggcgtataagaagggtctggagattgatcctaataatgaagctttgaagtctggattggctgatgctc

SEQ ID NO: 52323 - DNA, 389 bp, Gossypium hirsutum
  Clone ID: LIB3197-052-Q1-M1-F8
cccatcgccaagatgcagatcttcgtcaaaaccctaacggggaagactataaccctagaggtcgagtcttccgacaccattgacaatgtcaaagctaagatccaagacaaggaaggcattccacctgaccaacaacgtcttatcttcgccggcaagcaactcgaagatggccgcaccttagccgactacaacatccagaaggaatccactctccaccttgtcctccgtctcaggggaggtgcgaagaagagaaagaagaagacctacaccaagcccaagaagatcaagcacaagaagaagaaggtcaagctcgccgtcctccagttttacaaggtggatgagtccggtaaggttcagagactgagaaaagagtgccctaatgcggaatg

SEQ ID NO: 52324 - DNA, 449 bp, Gossypium hirsutum
  Clone ID: LIB3197-052-Q1-M1-F9
tatacgctcacgatctctctttatttgatttcaccaacttctctgataatcctatcatcgatcacccttcatctttcgcttcctttatcactacacctcccagtgattctgatgatgttgatgctggaaataaaccaacttccaccgctactcctaggagtccaccaaagcaccgccatgaccggacctcgccgttgcctttggggatggattggtctttacctcctcgcagatgggatgggcgggacactgtttggcctcacaatcctcagacagggtggagttactgtgttacaattccttcttggattattctgccaacatctggaggttcagatattgtcgtgttttaccgggttcaagttggcattcaatcaccagaaggcgtcactaccacccgggaaatattacgaagaattagtgatttcttgaagctactatctgaactt

SEQ ID NO: 52325 - DNA, 440 bp, Gossypium hirsutum
  unsure (1)..(440): unsure at all n locations; Clone ID: LIB3197-052-Q1-M1-G1
attaggtccaaaatactccactttacgttttcttcaatcttcttacaagcccattgaggttgttgccgcgatctcttcttcttcgtccttctcttcgcgccgctaggttttaccaaattcaaagcaaagtgaatgaaggtttttcgggcaaatatgaaaacgcgtgccacctttgactgttaattagaaagggatacatccatgagaaaatgcattcaacagcttcttcttcttcctcttcgtcgtcttcctattctattattcagcgtcttcgctctttagcgtcttcaaagctacgtttctttacctttatttctctatatctccatgtccagatttttgacatttgccaatattaggaaagctgcgcaatatgctatttcgaatccaacaacgagccattcggaattangaagtatggaaaacagtgtactatcggg

SEQ ID NO: 52326 - DNA, 321 bp, Gossypium hirsutum
  Clone ID: LIB3197-052-Q1-M1-G10
cccacgcgtccgcaatcctcgctttgtttaaaagcaatctgaagaaaaactcgaaaactttcctacaattttcaaccaaaaaaaagccactctctcgttcggtctttgatggcggaaatactttctgctttgaggtctttaatggcctctcactctcctcctctccatgccttaatcgtcccttctgaagattatcatcaaagcgaatatgtttctgatcgtgataaaaggcgcgaatttgtttctggattcactggaagtgcaggtttggcacttattacaaaagatgaagcaaggctatggacggacggccgatatttc

SEQ ID NO: 52327 - DNA, 261 bp, Gossypium hirsutum
  Clone ID: LIB3197-052-Q1-M1-G11
gccacgcctacgacctgctacttttgtttaaaaccaatctgaatacaaactcgaaaacgattctacaatattcaaccacactaaagacgctctctcattcggacattgatggcggaaatactttctgctttgatgtctataatggcctttcactctcactgtctccatgccttaatgcagcattctgagtattatcatcacagcggatgtgtggctgatcgggacaaatggcgcgaatttgctagtcgattgactgcaagt

SEQ ID NO: 52328 - DNA, 371 bp, Gossypium hirsutum
  Clone ID: LIB3197-052-Q1-M1-G12
gctctgtgaaggtatatgatgtggtcaactatgacatgatggttatgattcgcctaccttatgttcctggtgctgttgaatgggtctacaagcaaggcgatgtcaaagctaagcttgccattagtgatagaaattcatcattggtccatatatatgatgcacgagctggttcaaatgaacccatcatctctagagagatacacctgggcccagtgaaagtaatgaggtacaattctgcattcgacattgtaatatctggtgatgagcaaggaattattgagtactggagccctgccacacttcagtttccagaaagcgaggtccattttagattgaaaagtgatactaatctctttgaaattgcaaaatgc

SEQ ID NO: 52329 - DNA, 432 bp, Gossypium hirsutum
  unsure (1)..(432): unsure at all n locations; Clone ID: LIB3197-052-Q1-M1-G2
ggtttcaaataattttcttccaatgttaaaggagttgtttataggcataactgaggttccatttagatgtgcagaagaagtctctttgtgggttttggctgcaatgaaagatgttggaattgggttcttaattgaagtcggctttgctgctttcagcttcgtttttgccttgtgagcaatgaaaggccaaacgactganactggattgttcaatggngctggacttggtgctgttgcaggtgcaatcacagccgttcaattgcttgaatcattggctgatggggagttattatcacaggtagctttattagttaggttagtgagtcagaaggtcttcattgcacgggtgaattcagcaatgctaaaagcttttcaatgggaaaatgacatatttgaatcaacatatacagagatctcaaacatttgtgatgt

SEQ ID NO: 52330 - DNA, 301 bp, Gossypium hirsutum
  Clone ID: LIB3197-052-Q1-M1-G3
ggtttcaaataatcctcttacaatgttaaaggagttgtttataggcataactgaagttccatttagatgtacagaacaagtctctttgtgggctttggctgcaatgaaagatgttggaattgggctcttaatagaagtctgctgtgatgctatcagctttgattttgccatgagagctgtgaaaggacaaacgactgaaactagattgttcaatggggctggacttgtagctgctgcaggagcaatcacagccgttcaaatgcctgaattattggctgatggggagttattatcacaagtg

SEQ ID NO: 52331 - DNA, 436 bp, Gossypium hirsutum
  Clone ID: LIB3197-052-Q1-M1-G4
aaatattactcgtgggaagagtgtgtgaatctgagagaagttaagtctctgaggagaatgaatcatcccaatattgtgaagcttaaggaagtcatcagggaaaataacgttctgtactttgtgtttgaatatatggaatgcaatctttaccagcttatgaaagacagagaaaagcatttttcagaagtagaaatcagaaattggtgcttccaagtctttcaaggtcttgcatacatgcaccagtgtggatattttcatcgtgacctaaagccagagaatttattggtttctagagacataatcaaaattgctgattttggtcttgcacgtgaaatcagttcacatcctccatacacagaatatgtctcaacacgctggtatcgtgcgcctgaaatacttcttcaatcatacctgtatacttcaaaagttgatatgt

SEQ ID NO: 52332 - DNA, 347 bp, Gossypium hirsutum
  Clone ID: LIB3197-052-Q1-M1-G5
tctctctcgtctctgggtctcgtaagttggtgaatagtgttgtaattagtgccaatggctcggattgggacctctgcagctcacattgtgttggcaatatttgctgtggccatgtttgttgtgtccgggaccatggcacaggatattgctccttctcctgcaatggctaccggagcaggctctgctttgccggtttccgctgtcttcttatgctcttccatgttggtctctttaattgctctcttggtgcattgaattcaaagcttttcaagactttatgacattggctacccttaatttcactctcactggtgatgaggggagtagcctatacatcttctctagat

SEQ ID NO: 52333 - DNA, 235 bp, Gossypium hirsutum
  Clone ID: LIB3197-052-Q1-M1-G6
ctctctctatacgatattgcatatctttggagattttaatgctatgtgtccacgaaggcaacgaaccgcggagtatcttaactgtacccatgtgcacgatcatacatgccgctctgcaaagagcacgtctgtgatgatgcgtctgactgggatgtttgacacgacatttaaaccgcctgtctgagtccttgctcacactttggatttattccatacctgtgggaagcttctattg

SEQ ID NO: 52334 - DNA, 434 bp, Gossypium hirsutum
  Clone ID: LIB3197-052-Q1-M1-G7
cagccaattgtttgagctagctagctcttactcaaatggcaaccaaaacgatgatgttgcaaatattttcacttttcttctttttgttcagtatctgcaactccattttccttggtgctaatggagatgacaatggtggttggcaaactgcccatgccaccttctacggtggtgctgatgctaccggcacaatggggggagcttgtggttatggaaacctgtacagtcaagggtatggaacgagcacagcagctttgagcactgcacttttcaacaatggcttgagctgcggtgcctgctacgagctccggtgcaacaatgatcctcaatggtgcattagtcgaaccataaccgtgacagccaccaacttttgtccccctaactatgctttatctagtgacaatggcgggtggtgcaatcccccacgagaacac

SEQ ID NO: 52335 - DNA, 422 bp, Gossypium hirsutum
  Clone ID: LIB3197-052-Q1-M1-G9
ataagaaaaaaactctctatctcaatagccacacgttcatctccctcaacagtctcaaagctttgaacttattttaaattttattttaaaatatggaaaccccaccttttccctgttcttctcttctttacactctatttttcctttgattctgccgaattctttagattctttcttcaatttcaaaattagaaagaaaaaccttttatttcctctcaagcccatcaagttcagaaccctaattttactctttttgaaactcagacagtacaaatttcgcggattccttttggacaaaaatactcacaatcatatatatatttcaacaacaaaaataaaatcgaaatcttagagtctgaataataaatccattgccttctttaagtttaaaaatgcttttaaattgaagattttaattatct

SEQ ID NO: 52336 - DNA, 443 bp, Gossypium hirsutum
  unsure (1)..(443): unsure at all n locations; Clone ID: LIB3197-052-Q1-M1-H1
atataacaagatcagaataagaaaaacgctgcttgcaggtatgtcatcatccgataagccagaattagttgaaagggatgttaaggacaaggtggatgacaaagaagacaacagtggatttatagacaaggtcaagggtttcattcatgacattggtgagaagatcgaggaaacaatcggctttggcaagcctactgcagatgtagctgagattcacctcccttgtatcaatcttgagaaagcaaaattgtcgttgatgtcctcataaagaacccaaaccctgttccaatccccctcgtcgacattgactacctcattgaaagtgatggtagaaaactcctttcaggcttgattccagatgctggaaccatncatgctcatggtgaggagactgtcaaaataccaattactttgattatgatgatatcaaagtcatatgatga

SEQ ID NO: 52337 - DNA, 314 bp, Gossypium hirsutum
  Clone ID: LIB3197-052-Q1-M1-H10
ctgactatgattgttatttatctagttttgggtcacggaaggccaattaaagaacaaacaccggatgacggctcgctaagagatacctgcgccgacgaggctggacgtgttatcacaattaatgcttctggggtgactgagttctaatatatgaatgtagaactccgagaaaagctcaagggaaagtaggaggggtttgaggacagcgacaaatggatggaactgcttgatcacggattgatttcatgggattgctgcagttcagattcaaagatatcagaaagcgccccagagttacttggctccagcgcttg

SEQ ID NO: 52338 - DNA, 124 bp, Gossypium hirsutum
  Clone ID: LIB3197-052-Q1-M1-H11
ctccttcaacgatagcccttctcacctagccatcatccttccttcttctttttggtttccctcctccctccttttcctctttcaaagattcactggttttaattgggatccaaggttggtggta

SEQ ID NO: 52339 - DNA, 418 bp, Gossypium hirsutum
  unsure (1)..(418): unsure at all n locations; Clone ID: LIB3197-052-Q1-M1-H12
cttgagatcatcggagtcatggagttatcgtcggctccccactcatacagctacctttccagttatcatcaatagtgaagatgaggatagtgaaagtgaggttctaaggacccgtaacaacaacaagaataagaatcctttggaaaatggagacagattggactcctttctgcaaccgaaagatgatcctaatcttggtatttctaaacaagttcgagctttatggaagaagttgcagcagatcgaggtgcttgaagagaagcagttgagtggatgcatccttgatgaccagcaaattgcaaagctgcaaacaagaccagctcttgaaaattctcttgctgagnctggtgtaccagttgaaagatctcatttgaaaggatcatgttcaattctctctgatggaaaaggaaataaaaag

SEQ ID NO: 52340 - DNA, 383 bp, Gossypium hirsutum
  Clone ID: LIB3197-052-Q1-M1-H2
ttcagtgtaaaaaaactgtgagtatttagcttcaatttattgcttatttatgaatttaaaatgatgaaatcatggtgaaaaatggtatctatggattaaatgatgaaaacccagaatgaacatgtaaatcaccaggtgaataattgtgatgatttgttatcttttgcagcttgaaatatattttgtcctgtgtttttgttctttgtctctgttctttagtggatgaatggactccttttagatgtgatgctgagaaactgttggattgattgattgatgaaaaaaggtataccaaaaaagaggcagacatgagattcccagttccacttttgaacttggtccatttttttagcttttgctttgagttggtggatggtggatcc

SEQ ID NO: 52341 - DNA, 369 bp, Gossypium hirsutum
  Clone ID: LIB3197-052-Q1-M1-H3
ggatcacccgatcctacaaagcttctctcctgctcccggtatgatttccgcttggtttggttgttttggccatcgtgggtcttcttctctcccttcttctttcacaccctttctattctgattttcccacgcaataaacaaacctcccgattcagatccgtcctaaaaggtttcacaattggaaagtacatataatagctattgaacaccttttttttccccgtttgagatcaaggacctgtggagtaaataactacgtagacgaagatgtttggtacaactaatccttttgggcaatcatcaagtagcccatttgcatcccaatctgtttttgggcagaccagtgcaagtagcaatccatttgcacct

SEQ ID NO: 52342 - DNA, 399 bp, Gossypium hirsutum
  Clone ID: LIB3197-052-Q1-M1-H4
gggaaatctactcttactgattcacttgtggctgctgctggtatcattgcacaagaagttgctggtgatgttcgtatgacagatacccgtgccgatgaggctgagcgtgggatcacaattaagtctactggtatctctctgtattatgaaatgagtgatgattctttgaagagctacaaaggagataggcaagggaatgagtacctcatcaatcttattgattcccctgggcacgttgacttttcatctgaggtcacagctgcacttcgtattactgatggtgcccttgtggtcgttgactgtattgaaggtgtctgtgtccaaacagagactgtcctccgtcaggctcttggagaaaggatcaggcctgtcttgactgttaacaagatggacaggtgc

SEQ ID NO: 52343 - DNA, 246 bp, Gossypium hirsutum
  Clone ID: LIB3197-052-Q1-M1-H5
cttcctctaattttttttttctaagtttgggtcacggaatgcccaaaaaagaaaaaacaccgaaagacgctacactagggtttctctgccggttttggtttttgtgattttttgaaattctctgcttcgtcggtgactgatttcagatatatttatttatcactccaaaaaaaagctcaaaggaaagtaggaaggttttgaggatagtgaaaaatgggtggtactgcttcatcggagattgatttc

SEQ ID NO: 52344 - DNA, 73 bp, Gossypium hirsutum
  Clone ID: LIB3197-052-Q1-M1-H6
gcgtgcgctccttcaacgatagccctctagacctgggccacagacttccatcttctttttgttttccttcttc

SEQ ID NO: 52345 - DNA, 254 bp, Gossypium hirsutum
  Clone ID: LIB3197-052-Q1-M1-H7
tagaagtggatgctctagaaaagattaaggatcaccaagccactagtgcagaggtggcgcccatggatattatgtctgcaaaaccaggtatggatcatccaccctacagatctagatagatagtcatggacagggattgaaatcgtgacatatttctaaaatatcgaggcaacgatccttgatatggacctgcatcctgatgaccaagaattgagctatctggaatgaagcatgatgactgagtaaatgtcaaa

SEQ ID NO: 52346 - DNA, 450 bp, Gossypium hirsutum
  Clone ID: LIB3197-052-Q1-M1-H8
taacttttagattccctttccattgcactgctctttctttctatagaattagtcactcctgttctagatgaaggttctctccccaattcttgcttgcctagcgcttgctgtggtggtaagccatgctgctctctcacctgagcaatattggagctataagctgccaaatactccaatgccaaaggctgtcaaagaaattctacatccagaactgatggaggagaaaagcacctctgtaaatgtaggaggtggtggtgtaaacgtcaatacaggaaaagggaagcctgggggtgacacccatgtgaacgttggaggcaaaggagttggagtgaacacgggaaagccagggggtggcactcatgtgaatgttggagacccttttaattacctatatgcagccagtgaaactcaaatccatgaagaccccgatgtggctcttttctttctgga

SEQ ID NO: 52347 - DNA, 333 bp, Gossypium hirsutum
  Clone ID: LIB3197-052-Q1-M1-H9
gggattcaacatctatgttggtggtggtatgggaagaactcatagaatggaggccacttttcctcggctgggagaaccgttaggttatgttccaaaagaggacattttgtatgctattaaagccattgttgctactcaacgagatcatggcagaagggatgaccgtagatatagtagaatgaaatatttgatcagctcttgggggattgaaaagtttaaaactgttgttgagcaatattatggaaagaaatttgagcctttccgtgagttgcctgaatgggagtctaagagttacttgggatggcacgagcagggagatggtgctttgttttg

SEQ ID NO: 52348 - DNA, 261 bp, Gossypium hirsutum
  Clone ID: LIB3197-053-Q1-M1-A10
gtaaaaccaggttcaagatcactgatgaattaaaagctaagaggtcagatcgtgctgagttacttgctcaagtgagagccctgaatgttgattttgaacaatataaggagattttagacgagaaaaagaaggaaatagaaccactgcagcaggccttaggcaagcttcgcactaatagctataccggacgtggcagtatgtgttcatctgaggaagagctaaacgatgttatccatagcttgcaatatcgcattcagcatg

SEQ ID NO: 52349 - DNA, 443 bp, Gossypium hirsutum
  Clone ID: LIB3197-053-Q1-M1-A11
ctgcaacaatgccacatttctctaattctgtcaagcttaagtatgtcaagcttggctaccaatatctcgtcaatcatattcttacacttactcttatacctgtcatggctggtgttcttattgaggttcttcgtttaagccctgctgagattgttaatctctggaattcccttcattttgatcttgttcaaatcttgggctcttgtttctttattatctttgtagccactgtttacttcatgtctaagcctagaagcatttaccttgtggattatgcatgctacaaacctcctgtcacttgtcgtgttccttttgctactttcatggagcactcgaggctgaacttgagcaacaaccctaagagccgtgagtttcagatgaggattctagaaaggtctggtcttggtgaagagacttgtttacctcctgctattcattatatt

SEQ ID NO: 52350 - DNA, 446 bp, Gossypium hirsutum
  Clone ID: LIB3197-053-Q1-M1-A12
atgaaacactagttagataaatattagcctaagcattaaagtcttggagcctcattagaaggctgccctcgagtgtgtgtatcatggggtcattatggagatggaactctgtgttttacataagtaaagtccttggtccaaggttcaagacagtgtagctttctgaccaatttcactaaagtgcaagtagtgtcatggtgaagaaagcaatggtaacaggcattctcagctgctgatgtgaaaattttctcttctccctggcctgtgtctactcataggaagcagttgcttccttttgtagcttggacaatttgtggctattatacctttatgttcttccacaggaccttatttgatagtcatgatagatgggttgagaaatcaccttaattaaatagttggtcattttatatgctcaattaactgtgccatctcattgtctctga

SEQ ID NO: 52351 - DNA, 403 bp, Gossypium hirsutum
  Clone ID: LIB3197-053-Q1-M1-A2
acgcgaagatgaagaacaatgccattgtttgcaacattggtcactttgacaatgaaatcgatatgctcggtcttgagacctatcctggtgttaaacgcatcaccattaagcctcaaaccgataggtgggtcttccctgaaaccaaaactggcatcattgtgctggctgaaggacgtctgatgaacttgggatgtgccactggacacccaacgattgcatgtcctgctcgttcactaaccacgagaatgcccagctcgagctatggaaggagaaggcaactgcaaaatatgaaaagaaggattacgtattggcaaagcacctcgacgagaaagaagctgcacttcaccttcgcaagctcggagctaaactcactaagctcactaaagatcaagctgattacatt

SEQ ID NO: 52352 - DNA, 481 bp, Gossypium hirsutum
  Clone ID: LIB3197-053-Q1-M1-A3
gtttcgggctagacgtacgtttttctctttcagatttgctttaattataccatcactttagacccataaaagaagaaaacaggacggaaacaacgaaagaacccatctgtggtgctgcagaaatctcagaagggcatggcctcaaccgagagttccagatcttcaactgctggctctcccgattcatacataggcagcttgataagcttgacgtccaagtctgaaatcagatatgaaggtgttctgtttaatatcaacactgaagaatccagcatcggcttgagaaatgtaaggtcatttggaacggaagggcggaaaaaagatggtccacaagtgccagcaagtgataaaatttatgaatatatactggttccgtgaagtgacatcaaggacttgcaggttaaatcttcaccaccaccagttcagactccggcacctatacacaatgatcctgctattatacaggctcactatccccaat

SEQ ID NO: 52353 - DNA, 467 bp, Gossypium hirsutum
  unsure (1)..(467): unsure at all n locations; Clone ID: LIB3197-053-Q1-M1-A4
ctgttttccttcaaaaccctaatagctgtcctctcctcctgaacgtgttcgaaaatggttggttctgagggattgattctacgtggcaccatgcgtgcccacaccgacatggtgacagccattgctactcccatcgataactccgacatgatcgtcacttcctcccgcgacaaatccatcatcctttggcacttaaccaaggacgaaaagacctacggtgtccctcgtcgtcgtctcaccggtcactctcacttcgtgcaagacgttgtcctctcttccgattctcagttcgctctctctggttcctgagatggtgagcttcgtctctgggacttatctgccggtacctcagctcgccgttttgtcggccacaccaaagatggtctctctggtgccttttcaattgacaaccgncanattggttcggcttctcgagatcgaactatcaggctttgggaatacccttg

SEQ ID NO: 52354 - DNA, 235 bp, Gossypium hirsutum
  Clone ID: LIB3197-053-Q1-M1-A5
cgccccccttttatttagggtttttgattccttcatctttatcttcgatcaatcaaccatgactggcaaagccaagccaaagaagcacacagccaaggaaatagcggcgaagatcgacgccgccacaaccaatagaggcggcggcaaggccggatttgctgcccgttcgggtgtggagaaaggtggacatgctaagtacgagtgtcctcattgcaaaataacagctccagatttg

SEQ ID NO: 52355 - DNA, 464 bp, Gossypium hirsutum
  unsure (1)..(464): unsure at all n locations; Clone ID: LIB3197-053-Q1-M1-A6
agaggcttcgctccatattcggaacaagtgaaagacaatgggtagaagcccaggttgagaatgccaagcagcaagccattctcatggcgcttaaatctcaaatatcatcagatgaagctcatattcatcttgatcttcattcccttagaagaaagcacgctgaattggtgggagaggtttcaaacctttatcacaaagaagagaagtttttaactgagactattccagatctttgctgggagctggcgcaactccaggacacatacattttgcaaggtgattatgatctaaaggttatgcggcaagagttctatattagcagacaaaaggcgtttatcaatcatctgatcaatcatcttgcaaggcatcagctcttaaaaatagcttgtcaattggaaaagaagaatatgcttggagcatattcattgcttanagttatcgagtcagagcttcaggcatacctg

SEQ ID NO: 52356 - DNA, 219 bp, Gossypium hirsutum
  unsure (1)..(219): unsure at all n locations; Clone ID: LIB3197-053-Q1-M1-A7
nacccacgcgtacgagaggaatatttccatatgcgtaacaagtgaaagacaattctgataagcccaggatcataatgtcaaacactaagcgctccttatggcgcgttaattaaaaatatcataagatgaagtttatattcatcttgataatcattaccttataaaaaagtacgctgacttggtgggagaggtatcaaacctgtattacagagaaaagaa

SEQ ID NO: 52357 - DNA, 350 bp, Gossypium hirsutum
  Clone ID: LIB3197-053-Q1-M1-A8
cccacgcgtccgaaaaaatcctaaatttgtttgaattttctggcgatactatggatgaatctttcttcgatctaatggaattcttgaagaaacctacgataactgaaacattcgtcgacattttgttatgtgcggtgcccatatggttagccgtgatgatcgggctcttcatcggttgggcttggcgtcctaggtggaccagcttggtttttctaggtctccgatctaagttccggttcgtctggactgctcctcctgggttcggagctcgccgactctggctcgcctttactgctctttccgctttctctgtttgccgtacggttttctccaactttattaaagggaga

SEQ ID NO: 52358 - DNA, 458 bp, Gossypium hirsutum
  Clone ID: LIB3197-053-Q1-M1-A9
cacctctttcaaaatggaaattgaaagagaaaccaatgaaggcaactcaaggaggattcaagtccgatttataacgaaattaaaagcaccatataaagttccaacaacagccattgccatcccttcagacctctctcgtttaggcctttcctccattgttaacaagcttcttcaagctgtggattctgagtggaaaaccgagccctttgatttcctgatcgatggggagctggttcggatgtcacttgagcagtttcttcttgtcaagggcatctctgcggaaaaaattttggaaattgaatacataagagctgttgcccctcgaaaagaggaagagccttctccgcatgatgattgggtcagtgctggtgacggttctagtcctaggttcattttgactggttgctatgatagtttgggaaagatatggaaacaagcttgatggtgtacgcatatac

SEQ ID NO: 52359 - DNA, 71 bp, Gossypium hirsutum
  Clone ID: LIB3197-053-Q1-M1-B1
atcggagatgatccatatgagatataatatgggtccaggccttactgctaatatcaccattcacccaatct

SEQ ID NO: 52360 - DNA, 347 bp, Gossypium hirsutum
  Clone ID: LIB3197-053-Q1-M1-B11
attttcaaatacggtgtgttttgttcattagagggggggggacttattgggggggggggaaaaattagtcctttttttccggaggaaaaccttactccccgttgggctagggtcaagcttttaaggtggtcagcagtttgggatccctcatctttttgatcttcccattagaccaaccctttctgcttctggtgatagtggaacacctgaagtggtggctgatcctcaaggtgaagttgcccagacgtttcagaaccttggagtatgtgttgtgcaacagtgtgccaagattcgccagcaagtatcaacagcagttacatatgacaaatccatcaaggccataagag

SEQ ID NO: 52361 - DNA, 354 bp, Gossypium hirsutum
  Clone ID: LIB3197-053-Q1-M1-B12
ctctcgaagagggacaacaacaggcagctcttcttccttttctgcgtctcatcatcaaaccccaaactcttaactggcctcttcctcctcctctttactttaatttcatttgctttcacaaatctaagaccagagctccaaaagattgaatttttaacccctcaaattaaaatcttcctttttcgccttttgggttgaaaatttatataagcaagagggtgatttagaaacaatggatgctgattcatggagtgctcgtctttcttcagcttctaagagatatcaatcggctcttcaattacgatctgatatgtttaatgggtttgaagaaattgatggggaagatgaaataag

SEQ ID NO: 52362 - DNA, 356 bp, Gossypium hirsutum
  Clone ID: LIB3197-053-Q1-M1-B2
attggtttgagctggccagaacctccactaaagttgctatctcagcatgttttggacagaccaccttctttcaaatcagtcaaatcttttagagcaaccaagtcttttcgaacatatagttccttcaggtccataaatgacatggcatcaggaatagctttgcttgcagaacttgaccttgaatccctcatgaagcggaaaagaagatctttatatgtaagagtagttagcaagcaaatggcaggaattttcctcactatttgggtccgtaggagtttgcgcaagcatattcagaatttgaaggtgtctactgttggagttggtgtaatgggctacattggtaacaagggatctat

SEQ ID NO: 52363 - DNA, 430 bp, Gossypium hirsutum
  Clone ID: LIB3197-053-Q1-M1-B3
caaggaagaaagtgtgagattgacttgtttataatgcaatccgatgggaagaagatagttgatcctagcaagcaaactgcattgtcgtcgcgtctgaaaatggaactgctccaaccactaagagtaactgtagtgagccggggtcctgacactgagcttctagttgcaaatcccgtagagttatcaagcaagggccggccttttgttttttatgacattacccttgctctaaagatgcttaatacttgcatcttctcggcagagattgggagacacatgatcggagatcgagagtgggaagtttacaggattctactagatgaaggggctagttcatccattctgagacgaaaggttgaggaagaagtttggaagcgcttgatgggttgggaataactatgattggtcacaacattgccccctccacaat

SEQ ID NO: 52364 - DNA, 370 bp, Gossypium hirsutum
  Clone ID: LIB3197-053-Q1-M1-B4
ggggctgcttgctggacttggtcctcgtgttggtcgcactggtccgtccgtggggattgttgtttcattttatgaagttgtcaagttcgctttacattacagacacgaagatcatgagtgaaagacttggatttgtgccacaactatggttgatttaatgattcaagtatagtcacccttaaaaaattccatcatgtcgcttcaaaccactttggcaaagcttttcagtggatacccatgctcatgactcaattgattccagaatctggaaatccaagcctgatctttccaatctttttttctttttttccataaggcaaacatattgttccaagttgaaccagatttatggaacttttttttttttttt

SEQ ID NO: 52365 - DNA, 51 bp, Gossypium hirsutum
  Clone ID: LIB3197-053-Q1-M1-B5
acccgaaaaccctaactataagatactggacctaatggcgcgacatatcat

SEQ ID NO: 52366 - DNA, 432 bp, Gossypium hirsutum
  Clone ID: LIB3197-053-Q1-M1-B6
attttcaaatacgtcttgctgggtaaaacatataggtaccatgtgttgctgtggttgaaaatatgagtcactttgatgcggatggcaaacgctactacccgtttggtcgaggttcaggctctcaggttgtccagcagtttgggatccctcatctttttgatcttcccattagaccaaccctttctgcttctggtgatagtggaacacctgaagtggtggctgatcctcaaggtgaagttgcccagacgtttcagaaccttggagtatgtgttgtgcaacagtgtgccaagattcgccagcaagtatcaacagcagttacatatgacaaatccatcaaggccataagagttaaggtaccggattcagaggaagaattccttctgcatcctgcaacagtaagacggaatgaccactcttgccaaagtgtggatg

SEQ ID NO: 52367 - DNA, 304 bp, Gossypium hirsutum
  Clone ID: LIB3197-053-Q1-M1-B7
gacgcctttgtcttgtctctctcacggttcctggaccaaatcaagctaccgaaggccaggctataaacagtacaccccgacgttgagtgttttattttttgattcaccgatcaaagctcttaacaatggcttccaccatcttcattcaaactccgtttcaatccaaatctttgaacaaatccttgaatacccattttgttccttcctttaaactccctgtttccctctctttcaaaccccggaccgctgccttctccaaacgcgtccatatccgagctggtttgatcgaaccggacggtgggaa

SEQ ID NO: 52368 - DNA, 373 bp, Gossypium hirsutum
  Clone ID: LIB3197-053-Q1-M1-B8
gcggtagaagtgcatttgccgttgctttgatttgctttgtggtgaccgctgtcggtggtcaatcttctgcagcctcacctactaaagctccgccggcagcgactactcctgccactgctcccgctactgcccctgttagcaaacctaaagcaccggcttcaactgctgaccctaccacttacccaccaacttcttcaccaccggctgcggctccggagaagtctgcggcggttccagccccatctaaatctgctccggcttcttctcctccggctgctgctccggtgagttctccaccggctccagtacctgtgagctctcctccagccaaatcgcctcccgttgctgcaccgacgactccaccagagagctc

SEQ ID NO: 52369 - DNA, 82 bp, Gossypium hirsutum
  Clone ID: LIB3197-053-Q1-M1-B9
gaagaagttgatatgtccatgccttgagtctcgccgtctaaatctatggctgtgatcaatctccggcattcacacacactaa

SEQ ID NO: 52370 - DNA, 107 bp, Gossypium hirsutum
  Clone ID: LIB3197-053-Q1-M1-C1
accctcccgaaattggtaaaccggaccaacctttggaggcagcctttggtaagcttggggaatttaccaaaatgggccttaatgaccttttgccaaatgggcccttt

SEQ ID NO: 52371 - DNA, 363 bp, Gossypium hirsutum
  Clone ID: LIB3197-053-Q1-M1-C10
gtaacaaatgagtcgaatgtcaccagctgaggggtgcaggatccaacaacagatgatgtctaatactgacttgatgagaatggcctcaaaaagcatgaagaacatgacgccaagaaacttgttacaagctgcagatacagttaaagcacactaggtctgatgatatggcggagattggtgagaaaatggccaatgcatcaactgaaaggatagctgcattgcgagcacggactgatgctcatatcagttattaattaagtgcaacttgagatgtctaagaattaagggaatgaggttcataaacaaagtaaatataataacgtctttgaaaaaatatatgcttgcaaataaaaacctgaaagg

SEQ ID NO: 52372 - DNA, 175 bp, Gossypium hirsutum
  Clone ID: LIB3197-053-Q1-M1-C11
accaaatccaaaacaaacccccatttctgtaatgtaaaaaagatatccttccttccttcctttatttattcttcttcttcttcttcccaatggcttctgcttgtgttaacaacctcaccgtcgtctcaacggagaccaatttgcatcccacgccaccttaactctcctacgtttc

SEQ ID NO: 52373 - DNA, 376 bp, Gossypium hirsutum
  Clone ID: LIB3197-053-Q1-M1-C12
aaaaaaaaaaaaaaaaaaaaagggaaaaggaaaaagcaatgggaggtggaggtggtggtggtggtggtggtgagatagcagcggagacaaggaagaagaggaagaagggaaggccctctctcttagaacttcaaaaacgctctctcaaacaacaacaactgcaggagccgcagcaaccgcaattgcttcctcagaaaacccctaattcttctatcttttcgaaccgccgatccactcgccgccacccaaatctcaacggtgggtccccagtttccggatcgatttccggaggagaagacgacgacgacgacgaccgcctacagaagaagcataaaccattgcttggcttcaattcttctcgtactgatcagtatta

SEQ ID NO: 52374 - DNA, 289 bp, Gossypium hirsutum
  Clone ID: LIB3197-053-Q1-M1-C2
cccacgcgtccgaaggcttgcttgaggaagtcaccacttgcaaaagaagtcgacctccgtgctcttgccaaatatactcaaggctttagcggtgctgatattaccgaaatttgccaacgtgcatgtaaatatgccatcagagaaaacattgagaaggacattgagagagaacggagaaaaagggagaaccccgaagctatggaaaaagatgttgatgactaaatggcacaaatccagccggcgcatttcgaggaatcgatgaaatttgctctgaggaatgtgagtgatg

SEQ ID NO: 52375 - DNA, 103 bp, Gossypium hirsutum
  Clone ID: LIB3197-053-Q1-M1-C3
actttccaacccagaccgtttgattttaatcagacggtagtcatgccgatcagaaacatagcccgttgcccggcctgaagagctactcatccgaatgctttaa

SEQ ID NO: 52376 - DNA, 269 bp, Gossypium hirsutum
  Clone ID: LIB3197-053-Q1-M1-C4
ttgctcttgctccaagcagcatgaaaatcaaggtggtggcacccccaaagagaaagtacagggtctgaattggaggacctatcttggcatcactcagcaccttccagcagatgtggatttccaagggtgagtatgataagtccgatccatccattgtccacaggaagtgcttctaaatttacaagtcatttattgagatgatgggtctttggagctggtgggcggaatacaaatgggggcttatttccatccttcccatgcatctttca

SEQ ID NO: 52377 - DNA, 366 bp, Gossypium hirsutum
  unsure (1)..(366): unsure at all n locations; Clone ID: LIB3197-053-Q1-M1-C5
cccacgcgtccggttcctctgcaagcatttctcggctgaagaatttgaacaggaggactctcgatgttctagctgctaggctgtacttttattactctctttgctatgaactcactggtactctntctgaaattaggagtaaccttctagccctgcaccggattgcaacattgcgccatgacgagctgggtcaggagactcttcttaacctgctacttcgcaattacctccattacaatttgtatgaccaagctgagaaactgagatcaaaggcacctagatttgaagctcactcaaaccaacagttttgccgctacctcttttacttggggaagattaggacaattcaatttggagtacacagat

SEQ ID NO: 52378 - DNA, 306 bp, Gossypium hirsutum
  Clone ID: LIB3197-053-Q1-M1-C6
agttggagaaggttatgcgtgttaccgagtccgacagagttccaaatctttatattaagtgtcttgttatgttggaagatttcttggctgaagctttggctaataaggaagccaaaaagaaaatgagtagcagtaatcacaaggctttgaacgcaatgaaacagaagctcaagaagaataataagcagtatgaggaattgattaacaagtatagggagaatcctgagagtgaagaggagaagcttgaagacgaggacgaagacgaggatgaagatgaatctggctctgagttggaggacccgcaca

SEQ ID NO: 52379 - DNA, 438 bp, Gossypium hirsutum
  Clone ID: LIB3197-053-Q1-M1-C7
aacagaggagacgattcaaaaagaagcggcagtcatgatctcacagttcttcgtgctttctcagcgaggcgataacatagtgtttcgcgattattgcggcgaattagcaaaggcgtagtgcatagatattctttcgtaaagctaagttttggaaagaggatggtcaagaggaggcgccctctgactttaatgtggatggtgtgaactacttccatgtgaaggttcgttgggctgctgtttgttgcatccacacgagttaatgtgtccccgtctataggcctgtaacttttgcaaaggatagctcgcgtaattaaggattatttatgggttttaagatgaagattcacttacgtaaaaactttgtacttggatattaagtcgctggatgaaatcatttgtcttttggttattttgctgacgtcattcttacttatagat

SEQ ID NO: 52380 - DNA, 341 bp, Gossypium hirsutum
  Clone ID: LIB3197-053-Q1-M1-C8
atggaaaggggttttattgttttggccttgacggtggttttcgccgcgacggtggttacggcggctgacgagagtgggttagcgaatgagtgcagcaaagatttccagagcgtgatgacttgcttaagctttgctcaaggaaaagcagcgttccgtcgaaggagtgttgtaattcagtggcggggattaaagagaataaacccaaatgtttgtgttatattttgcaacaaacacaaacttccggtgctcaaaatctcaaaagcttaggtgttcaagaagataagctgtttcagttaccgtcggcttgtcaattgaagaacgctagcgtcagtgattgccca

SEQ ID NO: 52381 - DNA, 382 bp, Gossypium hirsutum
  Clone ID: LIB3197-053-Q1-M1-C9
gttgccagggttgtcaaggtgtgcgccatgtgggttatcattatccaacaaaaaacgcctcaagacacttccaggctaggtccatttgatcaggtgcatgcctgatgcgcctagccatgccttcttgtagggctataggcataattttctgatttttcattttatatatctctaatagtaagaaatttatccatctcaaactcaatatttgagcattcaacatcatggaccataaaggaataatgcatattgactaataaagaaatagcatgtttcatggataaactagacagcactttagagactgtatatcctaaactttattatgcagacacacatgactttcaaaaactcatacactttcatgaggggtgggctttgt

SEQ ID NO: 52382 - DNA, 163 bp, Gossypium hirsutum
  Clone ID: LIB3197-053-Q1-M1-D1
gattggtattgggtaaattggcggtataaatcgaattggcatttgtaagtcaaatttgaggactgcaactggtgaacaaaccactgatttgggcctaacaaggcttaaacagtgttaggatcaggaaattgtaatccccgaactctcgtaaaccctttttttt

SEQ ID NO: 52383 - DNA, 83 bp, Gossypium hirsutum
  Clone ID: LIB3197-053-Q1-M1-D10
attggctttaatgatgaacataaagtgggggggtgatccatgatgcataagagcttactgatttggtgagcttaatggactat

SEQ ID NO: 52384 - DNA, 406 bp, Gossypium hirsutum
  Clone ID: LIB3197-053-Q1-M1-D11
ggggatcctaattgctgttggtgaggcagtggcgtacgttctgtctggtatgtacggaagtgttggtcagctcggtgttggaaatgccattcttattattattcaactttgctttgctggaattattgtgatctgcctcgatgaacttctccaaaaggggtatggtttgggctctgggatctcccttttcatagccaccaatatctgtgaaaacataatctggaaagcctttagccctacaacaatcaacagcggtcgtggggctgaattcgaagtgctgtcattgcatgttcatcttttataaccagacagacaaagtcgagcgctcgtgagcttctacgcagatcttcaacgtacaattactcgtacgttgatctctatgtatctactcaggttcggtgttgct

SEQ ID NO: 52385 - DNA, 390 bp, Gossypium hirsutum
  Clone ID: LIB3197-053-Q1-M1-D12
ctttatccctctctcccccgtcggtcataactttgcatttcgtggtatttgagaatgggggcttctattttatcagatctcggaaccgagatcttaattccagtttgcgccgtgattggaattgccttttctctcctacaatgggttctcgtttccaaggtgaagctctctcctggtcgagacccgggttctcctagaaacaacggtgcgggtggaaaaaatgactgcgccgattacctcattgaagaagaggaaggacttaatgatcataatgttggtcttaaatgtgctgaaattcaaagcgccatttctgaaggtgcaacctcgtttcttttcactgaggaccagtatggtggcatttttatgggtgcttttgccaacctggatttt

SEQ ID NO: 52386 - DNA, 86 bp, Gossypium hirsutum
  Clone ID: LIB3197-053-Q1-M1-D2
acgcacgcgatttgttacttagatgatcatatagtcagcagcggctgcaagaagcgtgagaccttactgttatgtagaggttaatg

SEQ ID NO: 52387 - DNA, 188 bp, Gossypium hirsutum
  Clone ID: LIB3197-053-Q1-M1-D3
gaaagaaccagctaacccatactttgccaattgcaagcttcatctccatgtccctgctggcgccacccctaaggatggacccagtgctggttgcaccatgatcacttccatgctatcccttgccatgaagaagcctgttaggaaggatctagcaatgactggggaagtgactctgacacggaaaattc

SEQ ID NO: 52388 - DNA, 390 bp, Gossypium hirsutum
  Clone ID: LIB3197-053-Q1-M1-D4
cggacgcgtgggtgacccccctccaaaacgacgccgctctagccaatcggaggccgcatactcgccgtcaataagctttgatactttcttgattggagctccgatatccgcttttcacaagataatggagcaaaaagcttggctaattttggtgatttttacatgtttaattgcatcttcttgtgggagagaattgaaggtcgaccacaagcataaactccccgtctacaatcatactcttgccaccattttagtagaatacgcttccgcggtgtacatttcggatttgacggaactttttacttggacttgtgaaagatgtaatggtttgaccacaggatttgaagttattgagcttgtggtgatattgagaactgtttacaggcattt

SEQ ID NO: 52389 - DNA, 386 bp, Gossypium hirsutum
  unsure (1)..(386): unsure at all n locations; Clone ID: LIB3197-053-Q1-M1-D5
cggacgcgtgggctcttgtgacctcgatttcaagtgaaacagaatgggtaaggaaaagactcacattaacattgtggtcattggccatgtcgattccggaaaatcgaccaccactggccacctgatctacaagcttggtggtattgacaagcgtgtgattgaaaggtttgagaaagaagctgctgagatgaacaagaggtcattcaagtatgctngggtgcttgacaagctcaaggctgaacgtgagcgtggtatcaccattgatattgccttgtggaaatttgagaccaccaaatactactgcactgtgattgatgcgcctggacaccgtgactttatcaagaacatgattactggtacctcncaagcttactgagctggtttga

SEQ ID NO: 52390 - DNA, 393 bp, Gossypium hirsutum
  Clone ID: LIB3197-053-Q1-M1-D6
atcccgtcctacaaggccagacgctgaactgaaagttggtgctgtcgtacgttgcatcaaagtggatcctgactctcgaaccatatccaccataacgcgtaactgaatagtagacattggccgttgtcgctgctcttgaagacccaggacattctcgaaagacgtggaggctacctttagccgctaaactacatcgaggacatctgtcatttgaaacaactctcctgattctgaggttaacacagtttggtaaaaaatcccaagagatccgccagattgtaaatgagatttttgatggcatctgtaggttccacagttttttgtaaaattcttttattttggtttgtaataaataagtactaggatccgagttagcaatttgtaatagtttat

SEQ ID NO: 52391 - DNA, 446 bp, Gossypium hirsutum
  Clone ID: LIB3197-053-Q1-M1-D8
attggcagtaatgaggaacataaagtcagaagttgatgcaggaagcataagaccttactgttttgtggaggttaatggtctaaagttggctgcaccagagaatatttacacagtcatatatgaagccttaactggacatagggttagttggaaaaaggctctgcaattactgaatgaacggttttcagatggaaagaaaattgctaagggggatgaccgaccttgtattctacttattgatgaactcgatcttcttgtaaccagaaaccaatcggtactatacaacattcttgactggcctactaagcctcattccaagttaattgtgataggaatagcaaatacaatggatcttccagagaagttacttcctcgcatttcaagccgaatgggtattcaaagactctggtttggtccctacaattatcagcagctacaggaaatta

SEQ ID NO: 52392 - DNA, 264 bp, Gossypium hirsutum
  Clone ID: LIB3197-053-Q1-M1-D9
gcagtgaagaaagatgatcataatgggtgttattgttttggccttgatggtggcttccggcgcgacggtggttactgcggctgacgagagtgggttagcgaatgagtgcagcaaagatttccagagcgtgatgacttgcttaagctttgctcaaggagaagcagcgtcgccgtctaaggagtgctgtaattcagtggcggtgattaaagagaataaacccacatgtttgcgttatattgtgcaacaaacacaaacctctggtgc

SEQ ID NO: 52393 - DNA, 236 bp, Gossypium hirsutum
  Clone ID: LIB3197-053-Q1-M1-E10
attcattatttacgttaaggtgctctgggggggggcccttctttagtttgttgcttcttttctttagtttagtgtagttttaatattcgatcctctgtgctttttttagctttagttcattgatctatagctaaactttgaacctttttactgatgaagaaattgacttcattcccatgacgctattcttaatcggtcttcaggggttctgatgtttaggcattttgctacctgaa

SEQ ID NO: 52394 - DNA, 310 bp, Gossypium hirsutum
  Clone ID: LIB3197-053-Q1-M1-E11
cggacgcgtgggaaaaacaaggatcgtcattaagcaaaatcttacacgatgggtgaagaaacacaatcaaagaccacttctggtcccttcaagaataaagcctttcagcttgctcaggacacattttctcctcctaaagtgacgaagggggttatggatgattttaatgcaactgtttcatggctggcgagtcaagaggaaacgccagagccccaggagatacagcaagtagctggacaagggatcttaacttgtttacaagatgccatacattgtcttgcgcaaaagcatgatgtgcagcatattactg

SEQ ID NO: 52395 - DNA, 245 bp, Gossypium hirsutum
  Clone ID: LIB3197-053-Q1-M1-E12
agcaggagctatagatgcattgttggatcttgtaagatctcaccaatgtgaagaagcttccggaagactgcttgaagctttatttaacaatgtaagggtacgagagatgaaggtttctaagtatgccattgcacccttagcacagtatttgttagacccacagacaagatctgagtctgggaggctccttgcaactttagctcttggagacctctcccagcatgaaggacatgctagagcgagtg

SEQ ID NO: 52396 - DNA, 228 bp, Gossypium hirsutum
  Clone ID: LIB3197-053-Q1-M1-E2
ccgaattccgggtcgccacgcgtcgcaactggcgctgcctggaactcacaaggggtgggtcacttagacccgcgaccgacctcattctattcaaaatgcgctaaggagtatcatgcacctcacctaccgaatcaactggacccatgcctgatggggcttaagcccgcgaactctacccgggcggcccggcacggtcctggcctccataactatcacgtcactggggtc

SEQ ID NO: 52397 - DNA, 290 bp, Gossypium hirsutum
  Clone ID: LIB3197-053-Q1-M1-E4
cggttacgaacactaggagttccaaaaaggggcacacccgatattcacctccttcaaaagttttggcattttcattttcgtctccactaaaaaaagccctgcgtccttcgaatcgattccattcgatttcaccatcttttaaatcctatcaatttctcagatctttcccagtcttttctgcaaccatgagtaagggaccaggactcttcgtcgatatcggcaagaaagccaaagatctgttgactaaagattatacctcggatcagaagttcactgtttctacttacact

SEQ ID NO: 52398 - DNA, 185 bp, Gossypium hirsutum
  Clone ID: LIB3197-053-Q1-M1-E5
aggaaactcactctctgagattctctgaggcgcggcacgctatgaataaccacaccaaaagaatttgcacgcccatgttcttatttattcagatacgccttgggcacctggtatcaccaccgttggtccatttcatctcatataacgtgcggcggcgatccgctggatcgaagatgccgggggct

SEQ ID NO: 52399 - DNA, 409 bp, Gossypium hirsutum
  Clone ID: LIB3197-053-Q1-M1-E6
cggctttaacaaataaggaagaaaaagattcagggaggctataccttatggaataggatgcagagaaaacatgaatagaattcatgccaatcgatgacatgtcatcacctacctgatctccttcgattcagaaacttcttttattgaccggccatgggaaagaaagggagtggatggttctcgacggtgaagaaagtgttcaaatcttctcacaaagacttgcctgacaaaaaaagagagaatactgtggagaaatgggcaaattaggccccggatgtagtgtcctttgaacattttccggcggagagttcaccggacatcacgaataatgagagagccatgtctactcctctgaatgaagataggaaccatgccattgctgtcgccatggccactgctgctgctgcag

SEQ ID NO: 52400 - DNA, 457 bp, Gossypium hirsutum
  Clone ID: LIB3197-053-Q1-M1-E7
ggcaaatgactgtattggtgaagaagttgagaaaatggtggctgcattaccagatggcggtgtattgctgcttgagaatgtgaggttctacaaggaggaagagaagaatgatcctgaattcgcaaagaagctagcttctctcgctgatctctatgttaatgatgcatttggcactgcgcacagagcccatgcttccacagagggagtggctaagtacttaaagccttctgttgctggttttcttatgcagaaggaactcgattatcttgttggagctgtggcaaatcccaagaagccatttgctgcaattgtcggtggttctaaggtatcaaccaagattggagtgattgaatcactcttggccaaggttgatattctcatactgggtggaggaatgatgtttaccttctacaaggcccaaggatatgcggttggatcttcacttgtggaagaagac

SEQ ID NO: 52401 - DNA, 204 bp, Gossypium hirsutum
  Clone ID: LIB3197-053-Q1-M1-E8
accacgcgtacgtgctcatctaagatcctacggagctcactctgaaactgtttagggagtttaagctttggtttctggagtcctcttgcataaacaaaggaagtctgaagcttgggagcttgtcgaacagcttgagctaggaacttcaaaaaacaaaaaagtcggaagccagattctgatttacactacggctaagcagaatgc

SEQ ID NO: 52402 - DNA, 247 bp, Gossypium hirsutum
  Clone ID: LIB3197-053-Q1-M1-E9
agcacgctaacgggctcatttcagatcctacgaggctcactctgaaacggtttagggagtttaatcattgattcctgggtccctcttgcataaaccaaggtggtctgagccttgggggcgttgccgcccagcttgaccttggagctggaccaaacaaaaaagtcggtagccagtttcgtgtttacactacggctaggcagaatgcataggtgtacgaggctcatgcaagctagctcactcaattgaa

SEQ ID NO: 52403 - DNA, 309 bp, Gossypium hirsutum
  Clone ID: LIB3197-053-Q1-M1-F1
cgagaagttggtgcacctcttttggagaagttaccttggataaacagttctactcagacaaaaacatggtatcaagaacaggcagtacttcgtgtcagcttggggaatttcccgttttttgctatactagctctaataatgattggtgtcaaggaccaaaatgacagacgtgattcatggcatcatggtggatggattgcaaagatggtgatctggattatgcttgtgatccttatgttcttccttcccaatgttgtcatcacagtctatgaaatactatcaaaatttggtgctggcgtgtttttattg

SEQ ID NO: 52404 - DNA, 380 bp, Gossypium hirsutum
  Clone ID: LIB3197-053-Q1-M1-F10
cttaggtattgcttggtgccaagcaatggtataggttaaccaccctcgatggtgtattttatgttattacttgtgtatcatagcatacaaccaatcgacatgttgcatcatgaatgcgtcttcgtcgatagtgtggtatgacaaactgattagttttagatggtattaacccaaaagttctttaattaagtctgcttttggatgtaaaggcgaacaacgagcttgcattatttaacatagcatacagccaatttgacatgatgcatcatgaaggcgtcttcatcgacagttatgagacaatgattaattctagatattattaaccaggaagttttaattttaattcactcttgtcttagattggcaaccaatttttttat

SEQ ID NO: 52405 - DNA, 396 bp, Gossypium hirsutum
  unsure (1)..(396): unsure at all n locations; Clone ID: LIB3197-053-Q1-M1-F11
cggacgcgtgggttcgaaggcaaaacagtagtggagctaagatacgaagcatacgtaccgatggcgatcaagaacctcaagtctatttgttccgctgctagaccatcctgggatctccattctattgcggttgcacaccgtttaggcatagttccagtaggagaaacgagtgtgtttgttgccgtatcggctactcaccgtgctgattccctggacgcgtgtaagtttttgattgatgagttaaaggcatctgttccaatatggaagaaagaggtttattctgatggagaggtttggaaggagaatccggaatttctggagcggaggttggaactcngcaaggatggtggctgttgccgaaggaagatcgagactgcggcacattgataaaaagag

SEQ ID NO: 52406 - DNA, 474 bp, Gossypium hirsutum
  Clone ID: LIB3197-053-Q1-M1-F12
atctcttcaacgttcacaatgggcgcatttcaccgactcaacttgctccatttcacgctctctttagttgtcattgccgtcaatggccacaatataacggccattctcgaaggttttccagattactctgtttacaatagtttcctcacccaaacaaagctggccgatgagattaacacccgagagaccatcacttgccttgtcctcaacaatggggctatgtctgccctcacatccaaacaccccctttccgtcgtcaaaaacatcctcagccttcacgttcttctggactactatgacccccaaaagctccacaaaatctctgatggcactaaccttaacaccacgctttaccaaactactggtaatgcccctggaaaccttggtttcgtcaacatcaccgacctccaaggtggcaaagtcggcttcggctccgcaattcctggctccaaactcgactcatcttacaccaag

SEQ ID NO: 52407 - DNA, 173 bp, Gossypium hirsutum
  Clone ID: LIB3197-053-Q1-M1-F2
ccaacacccatttgacattgtggaaagctgatttatctgaagaaggaagctttgatgcagccattaatggctgttgtggtgtcttccatgttgccactccaatggattttgagtccaaagaccctgagaatgaagtgataaaagccacaatcaatggagtactggatataatg

SEQ ID NO: 52408 - DNA, 359 bp, Gossypium hirsutum
  Clone ID: LIB3197-053-Q1-M1-F3
cttttctaaaaggaatgaagaagggtctccattcctgagaagatttcaccgattagaaagtcctttcctccaaatggaaaagttaaaaatttcactatttctttagccaaaggtgcttttgctgataatttccatttttaacctgtcttctccccaaaaaaaaggtctttcctctgattctttgcctgagatatcaagttctttgtccgaaaaaacgttctttccgctggaaaatttcgaatcatgattccggtgaacgctctcccactcccgcgacggggcgctgtcaatcagctgtgcttcacggtcgaaggaaagcacatggaagaatttcactgtctgcattgctcgatctccac

SEQ ID NO: 52409 - DNA, 469 bp, Gossypium hirsutum
  Clone ID: LIB3197-053-Q1-M1-F4
ccctctcttcttaggtctgctgtatcttagttggtgattaattagccaatcacagcagccatgtctctcctcaatgatctcatcaacctcaacctcagcgacaccactgaaaagatcatagccgaatacatatggatcggtggatctggtatggatctgagaagcaaagcaaggactttgcctggaccagtgacggacccttcaaaactcccgaagtggaactacgatggttccagtaccaatcaagcacctggagatgacagtgaggtcattctttatcctcaagctatattcaaggatccatttagaaaaggaaacaacatcttggtgatgtgcgatgcttacacaccagccggcgaacccattcctaccaacaagagatttaatgcggccaagatctttagccaccctgatgttgttgctgaggagccttggtatggtattgagcaagagtacactcttctttaaa

SEQ ID NO: 52410 - DNA, 408 bp, Gossypium hirsutum
  Clone ID: LIB3197-053-Q1-M1-F5
cttgcctaacaattccactaggtgaaatcttaaaagagcagccaatggggaattggacgatcccttccgctcttattcttctttgccttctcagtctcctctcagaccaaggtaggaaactacaagcaaatgccaaggaaggagccgtggatcctccaaaagttgaggataatatcggcgctgtgcctcacggcttacaaactgattctgatgttgttaaaagggaatcggattcgatctcttcgagatcgcttcgcaacaatgcggagaaatttgagttccaagctgaggtgtctcggcttatggatattattatcaattctctttatagcaataaggacattttcctcccagagttgatctccaatgcttctggatcgttggacaagaataggtttctttcactca

SEQ ID NO: 52411 - DNA, 380 bp, Gossypium hirsutum
  Clone ID: LIB3197-053-Q1-M1-F6
gtttgatcttggaaagttgatggaggttcatggtgatgactccgaagatgttggtgtgaaaatatagaggcctgctgatgaaacaatggctgaggctgccccggaggtcattggagcttgaatgaaacactctttgaatttgcgtgtgtggttctctttctgattccaactgatttgatgattttgtttaaaactacgagaaatttttcatggttttgatttgatctctaggatatggttttgcagattgatattgagctagacaatctgatgtattataaagcccctactctatatatgaaatttattatatattggatgctttatagcaataaggacattttcctccgagagttgatctccaatgcttctgatgcgtt

SEQ ID NO: 52412 - DNA, 375 bp, Gossypium hirsutum
  Clone ID: LIB3197-053-Q1-M1-F7
cccacgcgtccgctctccttctgtttctggtcagagccaatctcaaaagactccccttttagctcacagctcctctcttgagtactataatgggtaaggagaaggttcacatcaacattgtggtcattggccatgtcgactctgggaagtctacaaccactggtcatttgatctacaagcttggtggtattgacaagcgtgtgattgagaggtttgagaaggaggctgctgagatgaacaaaaggtcatttaagtatgcatgggtgcttgacaagcttaaagccgagcgtgaacgtggtattaccatcgatattgcccttctgaagtttgagactaccaaatactactgtactgtcattgatgcccctggacatc

SEQ ID NO: 52413 - DNA, 415 bp, Gossypium hirsutum
  Clone ID: LIB3197-053-Q1-M1-F8
cttttgaggtacatatcaagctgtctcaacctgtgtgagaaaacaaagctgccattttacctcacacaggaagaaaataaaaacttaagcaaccaagcaagaaagaaagagcgatgaggcagggagcatcagcaaccaattaagatgatgaataggaacctaagggaatcgctggtgagtggcggcgggaggaataacagtaataacattccggcggcctcccttcatcaccgccgtggaaaaatttttaacgctggattgttccccagggattcagaagagaatttggatcttttctcaaagagtcgccgcaacctcttcgtcgccttcttcgatgtgtcagtaaaacagggaagaacatcacatggatcagatgatctactttcttctacagatggaggaaagcatgaatatg

SEQ ID NO: 52414 - DNA, 263 bp, Gossypium hirsutum
  Clone ID: LIB3197-053-Q1-M1-F9
cttaggtattgcttggtgccaagcaatactataggttaaccaccctcgatggtgtcttttatgttattacttgtgtatcatagcatacaaccaatcgacatgttgcatcatgaaggcgtcttcgtcgatagtgtggtatgacaaactgattagttttagatggtattaacccaaaagttctttaattaagtctgcttttggatgtaaaggcgaaaaacgagcttgcattatttaacatagcatacagccaatttgacatgatg

SEQ ID NO: 52415 - DNA, 380 bp, Gossypium hirsutum
  Clone ID: LIB3197-053-Q1-M1-G1
cggacgcgtgggcttcaacataataatctcaaggattgggatcagtattcgtcctccaaaacccagaaaaaagaaggtttcgaatcaacttcaaattctgaccagtatttgttaaaattttgattgagggtccttcggatttcctctggtaaatcctttcagcgttctcaagttggtttccaaagagagggtaaaaagcctgcgaatgctggaagatgtgcctcatcgttcaaaattccatttttgaagttgatgagcttacggtttttcgatcctttttcatctttgatgattctggatttggagttattggcgaaccatcactaactcttcatgcacagaagcagaattggcatataagtgctgcgagagcacctttt

SEQ ID NO: 52416 - DNA, 200 bp, Gossypium hirsutum
  Clone ID: LIB3197-053-Q1-M1-G10
catgcattgtgcttatttagctttttggggtgccctctaatctatatttgttttcagtcctttgtggtggtgcattcaagaaaaaaaaaccagtgaaaaattaataactcaaagcggctatttgttattagatggaaattttcaaaacaactattgtaatcacaacatgtataatgctgtagaggttatgcaggcactac

SEQ ID NO: 52417 - DNA, 184 bp, Gossypium hirsutum
  Clone ID: LIB3197-053-Q1-M1-G11
catgcgtccgcaccaaagtcttgctcgaactggaatcgctgcatatgtacggacgctgagcactgcaggcaatgctatctcacaagagaaggggctgctagtacaccctacattaacagaagctgctaatgctacactccccaacaactctttcattgctagatgggatatcatagctggaaac

SEQ ID NO: 52418 - DNA, 420 bp, Gossypium hirsutum
  Clone ID: LIB3197-053-Q1-M1-G12
gcttgctgagctggaggctcttcttgctgattttggagtaacacagaaggagagcaatggccaggatgagtcgcgtgatgttgcacaagaaaagaaagatggagagggagaaaagaaggaaaatcctccaggggagtctaaaagtgccaagaagaagaaaaagaaggataaatcgaaggagggtaaagaatcacaggatcagctgacgagtacagatgccaccaatgggccatatgaagctgctggaactgaacagaatgaggaggatgcatcagctgtgacgtgaaagagcggctaaagaagatggcatctatgaagaagaagaaatccaagtaagacatggatgcagctgcaaaagcttgtgcacaagaggctgcttcaaggagtgcaaggcttgctgctgcaaagaagaaagagaag

SEQ ID NO: 52419 - DNA, 392 bp, Gossypium hirsutum
  Clone ID: LIB3197-053-Q1-M1-G2
cccacgcgtgcgctttttggcaatcaattttgtgagcgagtatggctaacgacgttgaggttggtggtgagttccaagccaaggactaccatgatcctccaccagctccattggtggacggagaggagttgacaaagaggtcattttataaggctgtaatagccgagtatattgccacgctcttatttttatacatcactgtgttgacagtgatcagatacaagagtcacgttgaccctgataagggcagtgacaaatgtggtggtgttggcattcttggcattgcttgggcttttggtgggatgatctttatccttgattactgcactggtgggatctctggaagacacatcaacccagcagtgacctttgggcttttcttggcttggaag

SEQ ID NO: 52420 - DNA, 460 bp, Gossypium hirsutum
  Clone ID: LIB3197-053-Q1-M1-G4
cccacgcgtccgtaaaggaagaagaagcaatggccactcttacagtgcccacgacagttccttcggtgtctgaagattgtgaacagctaagaaaagccttttcaggatggggaactaatgagggcttaatcatagatatattgggtcacagaaatgccgagcaacgaaacttgattcgaaaaacctacgctgaaacctatggagaggatctcctcaaggcactagacaaggagctctcgaatgactttgagaggctggttttgctttgggctcttgatcctgctgaacgtgatgcccttttggctaatgaagccaccaaaaggtggacttcaagcaatcaggtccttatggaaatagcttgcacaaggtctgccaaccaactgcttcacgcaaggcaggcttatcatgctcgttataagaagtcgcttgaagaggatgttgctcatcacacgactggcga

SEQ ID NO: 52421 - DNA, 409 bp, Gossypium hirsutum
  Clone ID: LIB3197-053-Q1-M1-G5
ctctagaattcctctagagggagaaaacaaattgatgtcgaatgatcaatcttttgtaaaaagattttccctctcacccttcccttaattcaaatctcttatcctttttctcattttcttttcgtttcattccattcccagttttcttgtttacatcccaaaattttctcgagaaaatattgtttttatgcttttttctctgttttaaatcccaagatctctgcaacccagttcttcttttcacctgattaatccaatttcccatctgggtatctttagttctattttttttccttgtgaagtttaatttttcttttgttttttttttttttggggggggggggacgggtaatttattaaattaatttcatggtccttctttcctatcccaatttttaaggatttaatc

SEQ ID NO: 52422 - DNA, 466 bp, Gossypium hirsutum
  Clone ID: LIB3197-053-Q1-M1-G6
cccacgcgtccggggaatgaccggagatggggtgaacgatgcacctgctttgaagaaagcagacattggaatagcagtggcagatgctacagatgctgcaaggagtgctgcagatatagtcttaactgagcctggcttaagtgtgataatcagtgctgtgttgacaagcagagctatattccaaaggatgaaaaactatacgatatatgctgtttccataaccattcgtattggtcttggttttgtgcttctagctctgatatgggaatatgatttcccacctttcatggttttgataattgcaatccttaatgatggaactatcatgaccatttccaaagaccgagtcaagccatcttcgaccccaaacagttggaagcttaatgagatatttgcaaccggcgttgttattggaacctatcttgctttggttactggcctgttttactggattgaattgatactg

SEQ ID NO: 52423 - DNA, 213 bp, Gossypium hirsutum
  Clone ID: LIB3197-053-Q1-M1-G7
tttcatggtggattcaaagttttagccatcatcgagatctttcggtattcgctttcacggcaaggattggttaatgtcgggaagagattgtttcccgatgttccctcctctgaaaatggtgtttagttaatgatattcatttgacatttcattttgtttactgtccttatatccaaacttgttgtcgggatcttcggttggtactgttatctc

SEQ ID NO: 52424 - DNA, 321 bp, Gossypium hirsutum
  Clone ID: LIB3197-053-Q1-M1-G8
cattaattatgtatttcataatagaggtagtttcgactgaaaccccaatttcaacaaacgacacttcctggtcactaaaatatataacaaaatgaagtctttattcaatactcaccaacatatatggagagatgttagaagtacacattccgagtatttccaatattagttatattttcagagggggattcatgcaccacactattcgttaccacaggggtagcggagctcactgtgacatctgcaaatggctcaacaccaataagaaatttcttagcttttgaatcaaaacaaacagttttctgatcaaccctaatgaca

SEQ ID NO: 52425 - DNA, 364 bp, Gossypium hirsutum
  Clone ID: LIB3197-053-Q1-M1-G9
gattcattttggattacataacatatgacggcgggacagttaccctgattgcgacaatctacactaactgttcactaaaagatataacagaatgaagtctttagtcaatcctaaccaacatatatggagagaggttacacttacacattattagtattggcgatattatactatattggcagagggggatgcatgcaccagactattcgtatccacaggggtagcggagctcactgtgacatctgcgcatggctaccaccaattagagatttcttagctattgaagctgaacatacagatttctgatcaaccctaatgacactagctagagcgttcccagcgaccaaaattctcttggcacggg

SEQ ID NO: 52426 - DNA, 443 bp, Gossypium hirsutum
  Clone ID: LIB3197-053-Q1-M1-H1
gggattcgcttgaacagacaacccctccccaaaaaaaaccttgcactttttccggagtcaaaatgggtatttctcgtgattcgatgcacatgaggcgtgccactgtaggtaaaaagaatgcttggaggaagaagagaaagtatgagcttggaaggcaaccagcatacacaaagctttcaagcaacaagacagttagaaggattagggatcgtggtggaaatgataagcggcgtgctctcaggctcgacactggaaactactcgtggggaagtgaggctatgactcgtaagacccgaattttggatgatgtgtacaatgcatacaacaatgagttggctcgtactcaaactctggctaagagagctattgctcaagttgatgctgcaccattcaagcagtggtatctccagcactatggggtagacattggtcgcaagaagaaa

SEQ ID NO: 52427 - DNA, 101 bp, Gossypium hirsutum
  Clone ID: LIB3197-053-Q1-M1-H10
tcgatttaatagcctggacgtcattataaggtgggggtgtctatgacgaaacatgaagctggtccaaattgataacagtgtccaatcatatctattcttat

SEQ ID NO: 52428 - DNA, 439 bp, Gossypium hirsutum
  Clone ID: LIB3197-053-Q1-M1-H11
gcgaaacgggttcaggaaagcatgtaccgagagctgtctttgttgatctggagcccactgttatcgatgaagtgcggactggcccttatcgtcaacttttccaccctgagcagcttatttctggcaaggaagatgctgctaataactttgccagaggccactatacaattggaaaggaaattgttgatctctgccttgatcgagttaggaagttagctgataactgcactggtctgcaaggttttatggtgtttaacgctgtcggcggtggaactggttctggtttgggatctttgttgttggagcgcttgtcggtagattatggaaagaagtcaaagcttgggttcaccatctatccttcgcctcaggtctcaactgcagttgtggagccttacaatagcgttctgtccactcattcgcttcttgaacacacagatgt

SEQ ID NO: 52429 - DNA, 471 bp, Gossypium hirsutum
  Clone ID: LIB3197-053-Q1-M1-H12
gttcggtctgctcacgattgcaaccagcttccattctgatattttcccctttttttactcacagtcatgcctcggtattactgtgattattgcgacacttatttgacccacgactctccatcagttagaaaacaacacaatgcagggtacaaacacaaggcaaatgttaggacgtactaccagcaatttgaggagcaacaaacccagagcttaatcgaccaaagaatcaaggaacatcttggccaagctgcagctttccatcaggttggagctgcttttaatcaacatctaatggctcagagacctcgacttcctattcttccgaatcctgttatgcctattccgaggggtgcacctttacctataaatcaaccaatggtccctgggattaggccccctgtactgccaagaccagttccaggtgctccaggttatgttcctgttccaggcatgccaccaacggtagcacca

SEQ ID NO: 52430 - DNA, 102 bp, Gossypium hirsutum
  Clone ID: LIB3197-053-Q1-M1-H2
ctaaaaaccagtgaatcattgaaacgtgttccagccttccaccttctacattcgttttcaactctccattaaatgaaaaaatccaaaaggaaaaacaaatta

SEQ ID NO: 52431 - DNA, 344 bp, Gossypium hirsutum
  Clone ID: LIB3197-053-Q1-M1-H4
ccagcatctaccggacagggtttgcgaatcagtgcacgggtagctcgacaagatggtcaaatattttacagtttaatgtttgagagtatctcacagatcacacttgatggattcatgattcagatcaacacgatattcgtctggtctggcagctgatggacctcttcaggttcccccattggcaccgggagcagcagccaggacactgctccctatggtattgttccagaatatgtctcctggtcctcctagctcacttttgcacgttggtgtgaaaaataatcagcagcctgtctgttactttaatgatacaatcttgatgcatgtgctgctttccgagggat

SEQ ID NO: 52432 - DNA, 477 bp, Gossypium hirsutum
  unsure (1)..(477): unsure at all n locations; Clone ID: LIB3197-053-Q1-M1-H5
gtccggccgacatgtatggacccaaaactaacgaaatgcttagtgcctttccaccagaatttcgttagttatggttggaaaggcattgaagcatttgccacgagagaaggtacagttggctacaaaattcggtgttgaaagcatgggtccaggtggtccggttatcaatggcactcctgaatttgttcgttcttcacttgaggctagccttcaacgccttgatgtggattatattgatctttactatataatcagagttgaccacaagactcctatagaagataccatggaatgaactgaataagttggtggaagagggaaaaataaagtacattggtatatctgaagctagccccgaaactataaggagggcacacgctgttcatcctcttactgcagtacaacctgagtggtcgctctggactcgtgatgttgaggaagaaataattcccctctgcagggaacttgnaatcggga

SEQ ID NO: 52433 - DNA, 468 bp, Gossypium hirsutum
  Clone ID: LIB3197-053-Q1-M1-H6
cggacgcgtgggctcttggagaaatttacagaattgtcaaaattgtcggatctttgtccgccaaactctacaaaccttggatattgtttagttctgaaaatcccacaaacttccctgctcttgtgagggagtgttcttctgtgtggtcaagttcaggacttgaagaagcccttcaaaatctgactgatttgacagatttaaaatatgatgttcaagctttacttggttccattcagagtattcatgatcctgatgcgcatgaactctataaacaagttttcttggagcaagaatctacatgttgtctgtcaggtttaactgcaggagcagtgccaggcatgaaaatggtgctttgggatggacggcattactttgtaaccattgtcaacttgtgggcaaatttaataagtcgcaatccaccaaatttgccgctcatacatgctcgaaaataatgctgtcatgaaaaga

SEQ ID NO: 52434 - DNA, 362 bp, Gossypium hirsutum
  Clone ID: LIB3197-053-Q1-M1-H7
cttattcttgctctcttttataaataaacagaagggtcaaaattgccggatctgtttccaccgaactttacacaccatggatattgtttattattgaatgatcaacaaacttgcctcttcttgcaaagaaaaggccttcaggatgaacaaaaagtatgatctaggaaggcaatctgataacacaaagctgttacacaactaaacaagtatgaggaatatggattgaggtgggaatgagaaattgagtactctgaggctcaacaccggaaactaactcatggtgaagtaaggctgtgactcgtaagaccaagattttggaatgtgtgtacaaagcattcaacaataaactggttctcactcaa

SEQ ID NO: 52435 - DNA, 296 bp, Gossypium hirsutum
  Clone ID: LIB3197-053-Q1-M1-H8
actcaatagcctggacgccattatcattttcgccttttcatgtcaaaacatcaagtctgttcaaatgatagcagtttccaaaatatctatttttatttgctaccttttccgtttcatttcaccgtccacatcttcagcccgaattttgtggccatctttcttctggagtagtttcattgcatttcaacgtctctcccaccaaagacaagacgttggaatgaagaatcgattttgaagctttaagggttcgaacaactagtcttgaagtcgatctggagtttctaatatcaaaagct

SEQ ID NO: 52436 - DNA, 230 bp, Gossypium hirsutum
  Clone ID: LIB3197-053-Q1-M1-H9
actcaatagcctgtacgccattatcattggcggctgttcatgtcaaaacatgaagtctgtccaaatgataacactttccaaaatatctatttatatttgctaccttaaccggctcatttcaccgtccacatgttcagaccgaatattgtggtcatcactattcaggaggatgtgcattgcgtttcaacgcctatccctccagaaacaatacatcccaatgattaatctat

SEQ ID NO: 52437 - DNA, 151 bp, Gossypium hirsutum
  Clone ID: LIB3197-054-Q1-M1-A1
tcgacgattttctttagagtgttatatttgatcgttctctttcaaaatcaattcctaagcgagagtattatcccacctataaaatggctaattctaatgacctcaactttgacatgcaccatgtatcgagactattttatgaacaaacaaa

SEQ ID NO: 52438 - DNA, 446 bp, Gossypium hirsutum
  Clone ID: LIB3197-054-Q1-M1-A10
gatcaacaatagacaggtacaagaaggcttgctcagatacttctaacacaaacactgttactgaaatcaatgctcagtattatcaacaagaatcagccaagttgagacagcagattcaaatgttacagaattctaacaggcacctaatgggagattccttgagttccttaactgtgaaagagttaaagcaggtagaaaacaggcttgaaagaggaattactaggatcaggtccaagaagcacgaaatgctactagctgaaatagagtttttgcagaaaagggaaatcgaattggaaaatgaaagtgtttgtctccgaaccaagattgcagaaattgagaggcttcagcaggcaaacatggtgactggacctgagcttaatgctattcaagctttagcttctcgcaatttctttagccccaatgtcattgagcatccatctgcttac

SEQ ID NO: 52439 - DNA, 270 bp, Gossypium hirsutum
  Clone ID: LIB3197-054-Q1-M1-A2
gatcgggcggacaacccccgcagacgctatgatcaagaagctgacatgacatctgctgccgaggcaagcatggtgaaccctgctttctgcgtttcctgattccttgctctacttaaatactacgatgacgccgacgacctcaagcatttaagcgaggagatgcatggtgacactgacgggatatactttgacattggcgatgaccacaagggtcgtttctcgaaggggtctgatgcatatgagaacacaaaccacatggccgttgttgtt

SEQ ID NO: 52440 - DNA, 430 bp, Gossypium hirsutum
  Clone ID: LIB3197-054-Q1-M1-A3
gcttgttccattagaaggagttagaagacaattccaaaaatacagcagaaagcaaatcgaccccatagagccatctgcaactgactctaaaactgcatcttccattgaggatgtagttgttggaccacagtctcttgaaattcaagagggtactgatggcatctctcttaaaccaattgccaacaccgataattgtgagtcagacacgggatctggaaagttgaccgataaaaacaatggtagtggagacaacaagagatggcatagtgtgccttctttaccttcatatgtaccatttggacagatctatctcttggagaattcgtcagtggaatcactctcaggtgcagagtactcaaaagtgacatcggtcagatctgtcattgttgaattaagagagagacttcaatctcattcaatgaagtcatat

SEQ ID NO: 52441 - DNA, 300 bp, Gossypium hirsutum
  Clone ID: LIB3197-054-Q1-M1-A4
cgaaattcagaaagaaatttcccagtgtcatcttaaatcgtgcgctccatttattctccttaatttcccgatcgtttgatctgaaagtgatggcggacgtgcatatgggatcagagtcggagaccttcgcattccaggcggagatcaaccagctcttgagcttgatcatcaacactttctacagtaacaaagagatcttccttcgcgagctcatcagcaatgctcctgatgcattggataagattagacttgagggcttaacatacaagagcaagcttgatgctcagtcggaacttttta

SEQ ID NO: 52442 - DNA, 449 bp, Gossypium hirsutum
  Clone ID: LIB3197-054-Q1-M1-A5
cccacgcgtccgatcaaatctttttcattttcagggttttgcctcgctcggactctctgctgccttcagtacgctttgggtttatggccgatttcgagggcaataatcgagaaacattggaagatgacttctgtctacttgaagattcagatttagagggggatgttgatgaacgtttttatgagcttccaattctctcacccaaggctaaagctaagattccggtggattacaataaagccctcaaatatgtagacaggaaggaagcagggttagaagatgtcttgagggaccatgctcttcatttactccctgcaaaaacactctttaggttcaaaactgtttccagaagatgggatcactggataagcagcccgctgtttgcccaccggcaaactacttacttcaaaaacgtatctggtctcttttgtcaagttgctgatcacagt

SEQ ID NO: 52443 - DNA, 450 bp, Gossypium hirsutum
  Clone ID: LIB3197-054-Q1-M1-A6
cgcgtccgcccacgcgtccgcccaccatgactctagaaatcgaagctcgagacgttattaagattgtgctccaattttgcaaagaaaattccttgcatcaaacgtttcaaacgttacagaacgagtgtcaggtttctctgaatactgtagatagcatcgagacgtttgttgctgatattaacagtggaagatgggatgccattttgcctcaagtggctcaactgaagctcccaaggaataaactggaggacttatatgagcagattgtattagaaatgattgaactaagagagttggacaccgcacgtgctattttgaggcaaacccaggcaatgggtggtatgaagcaggagcaacctgaaagatacttgaggcttgaacatcttcttgtcagaacttattttgatccaaatgaggcttaccaggattcaacaaaatagaaacgccgtg

SEQ ID NO: 52444 - DNA, 277 bp, Gossypium hirsutum
  Clone ID: LIB3197-054-Q1-M1-A7
ctctacttttcctctcgatttcccgagctaatgggaagagtcttgaaggtaaaaaccgaagaaacaaaggctctctctctttgtgaatccaatcaaatcgaaaatgttgagagtggcaacgaggcggctcacttcttattcgtctgcgtggaggtcgcaccaggccacctccgctatcgactatcgtactttcatcgacggcgccgattcttctgattgtttcagatccaaattctcctactactcctcttacttttcctttcttttttgcttctca

SEQ ID NO: 52445 - DNA, 367 bp, Gossypium hirsutum
  Clone ID: LIB3197-054-Q1-M1-A8
ctgatatccagggcttgcttcacttggtttatgtcacttggttgtcagtccgggccgattacattgcaccaccaattcaagctttgtctaaattttgtgtagctttattccttatccaatctgtagatcgtatgatacttagtttaggctgcttttggattaaatacaagaagattaaacccagaattgagggggatcctttcaagtcagatgatgttgagggatcagcctatgagtatcccatggttcttgttcaaatcccaatgtgtaacgagagagaggtttatgagcagtctatctctgctgtctgccaacttgattgggcaaaggaccgattattggttcaggttcttgatgattctaatga

SEQ ID NO: 52446 - DNA, 423 bp, Gossypium hirsutum
  unsure (1)..(423): unsure at all n locations; Clone ID: LIB3197-054-Q1-M1-A9
gcgatggcaagttccctctcaatatcaccacttcggggaactccgtgaatataacaacagggttgacaaacaccagtgtttccggcactatttacactgatggtcagcttgctgtttatcaaatcgatcaagttcttcaaccattgcaaatatttgcacctaggcctccagctccagcaccggcaccggcaaagtcgaagaataagaaggctaccaccgttgctgatagccccgatgttaccccagctgataactccaaagcggccaccttgcaaaatgttggtttgtttggagttgctgctctagttattgcactttctttgtgaccatgaaaatggagaaaagaagaagacagtgattttgatggtgatcaagatggcgagtgttttttattttttcaataattatcatttanaaaattat

SEQ ID NO: 52447 - DNA, 403 bp, Gossypium hirsutum
  Clone ID: LIB3197-054-Q1-M1-B1
cgagtgtttacgtcggcccgccgaacgggaatgattggttcgagaaacaaaccgacgggacgcttaatatattgtgttcgtcttggatggattggttctatggtgggttgcaattccaagttgagcatcatttgttcccgaggttgcctaggtgccatttacggacaatttcaccatttgttaaggagttgtgtaagaaacacaatttggcttacaattgtgcttctttttggaaagctaatgcaatgacaattgagacacttaaatcagctgcattacaagctagggttcttaccaatgctgttccaaagaacttggtgtgggaagctgtcaacacacatgggtgacaactattttatgaatatgcttattattattattattatcgccataaatttttatg

SEQ ID NO: 52448 - DNA, 431 bp, Gossypium hirsutum
  Clone ID: LIB3197-054-Q1-M1-B10
cggacgcgtgggtcatgatgttaccttgtttatgtcgtttaaacagcctgggggtatgttggaaatcgcagttcgggattcagagactttctgctgaaaccggagctgcttcgatctattgtggattctggttttgaacatccttctgaagacaattgagattcttttcagcaaaaggatattcttagatatggaggtgcataatttggctttctgttctggtgttttggattctctggtggttgaattgaaagcatcaaaggacttctctaagttatatgcaggctttgcaatactttggcttcatctaagcttgaaccagccctctgatgtatatagatttttcttcttttctgatcttttttctttgattaatgagaggtgatggataatttggctttcttctcttactaggatgaaatttgttttag

SEQ ID NO: 52449 - DNA, 204 bp, Gossypium hirsutum
  Clone ID: LIB3197-054-Q1-M1-B11
tcttttttcttaaaaacccttttgactctactgtcctcaattatgataatgagaatgataatgataaggaattttctctactttatggataaaatatgcggaagctgctataatggatacgttatggacatggactttaacattaacgtgaacactgtgctttataaacttatattttaagtctttttttgattatacattcta

SEQ ID NO: 52450 - DNA, 427 bp, Gossypium hirsutum
  Clone ID: LIB3197-054-Q1-M1-B12
aattcttggttgtttcgttcgttttaagaacagagattcgaagatgagtaagcttcagagtgatgcccttagagaagctatttcaaccattgtggctaattccaaggagaaaagtcgcaagttcaccgagaccattgaactccagattgggctgaaaaactatgatccccaaaaagacaagcgtttcagtggttccgtgaagctgccacacattcctcgtcccaagatgaagatttgcatgcttggagatgctcaacatgttgaagaggctgagaagattggtttggattatatggatgttgaagcattgaagaagctaaacaagaacaagaagttggtcaagaagcttgctaagaaatatcatgcatttttggcctctgaatctgtcatcaagcaaatcccccgtctcttgggtcctggtctcaac

SEQ ID NO: 52451 - DNA, 452 bp, Gossypium hirsutum
  unsure (1)..(452): unsure at all n locations; Clone ID: LIB3197-054-Q1-M1-B2
cggacgcgtgggcggacgcgtggggctgagtttaagcatatcaataagcggaggaaaagaaacttaccaggattcccctagtaacggcgagcgaaccgggaaaagcccagcttgagaatcggtcgccatcggcgtccgaattgtagtctggagaagcgtcctcagcgacggaccgggcccaagtcccctggaaaggggcgccggagagggtgagagccccgtcgtgcccggaccctgtcgcaccaagaggcgctgtctacgagtcgggttgtttgggaatgcagccctaatcgggcggtaaattccgtccaaggctaaatacgggcgagagaccgatagcgaacaagtaccgcgagggaaagatgaaaaggactttgaaaagagagtcaaagagtgcttganattgtcnggagggaaagcgatgggggccggcgatgcgccccggtcggatg

SEQ ID NO: 52452 - DNA, 442 bp, Gossypium hirsutum
  unsure (1)..(442): unsure at all n locations; Clone ID: LIB3197-054-Q1-M1-B3
cccacgcgtccgcagggagcagagggaaaaaggataaaagcatcgttgtgttcttgcttcttcttcaactctgtctctccgtctctgaacctccttctttcgttcttttcttattcagtattgtaaaagatggccgatgctgaggatattcaacccctcgtctgtgacaatggaactggaatggtgaaggctggttttgctggtgatgatgctcccagggctgtttttcccagtattgttggtcgaccccgacacactggtgtcatggttgggatgggtcagaaggatgcctatgtaggagatgaagcacaatccaaaagaggtattcttactttgaaatatcccattgagcatgggatcgtcagcaactgggatgatatggaaaagatctggcatcatacattctacaatgagctccgtgttgctcctgangagcaccctg

SEQ ID NO: 52453 - DNA, 431 bp, Gossypium hirsutum
  Clone ID: LIB3197-054-Q1-M1-B4
attcttattccttttatatttttcctctccaattttccgtcactttcccgagaaaatgagagaaatccttcacatccaaggtggccaatgcggcaatcagataggagccaagttctgggaagtcgtatgtgccgaacatggcatcgattcaacgggtcgatatggtggtgactcggagctccagcttgagcgaatcaatgtttactacaacgaagccagttgtggccgttttgttccccgcgcagttttaatggatctggaacccggtaccatggatagcgtaagatccggtccttacggacaaattttcagacccgataacttcgttttcggacagtcgggcgccggaaacaattgggctaagggacattacactgaaggagcggagcttatcgattccgttctcgacgtagttagaaaggaagccgaga

SEQ ID NO: 52454 - DNA, 444 bp, Gossypium hirsutum
  Clone ID: LIB3197-054-Q1-M1-B5
caaaactctcaaaggcactcacttcgatatcgaagtcaaaccagaagatgcggttgcggatgtaaagaagaacatagaaactgttcaaggggcagatgtttatcctgctgcacaacaaatgcttatctataagggaaaagttcttaaagatgacacgacactggctgaaagcagtgtcactgaaaatagctttattgtgatcatgttgacaaagaataaggttgcatctggggagggttcaactgcttcagctgctcctacaatgaaagctcctgaggcaagtaggccaccaactgctccagctccagcttctactgcacctgttgcaatgtcagctacggctgcacttactgctgaatctgctcctgttgcttcaagtactcctctgtcagattctgatgtttatggccaagcagcatctaatctggttgcagggagtaactt

SEQ ID NO: 52455 - DNA, 443 bp, Gossypium hirsutum
  Clone ID: LIB3197-054-Q1-M1-B6
cccacgcgtccggtccactgcaagctcggctctcgattcccccaaaatccagctcttcctttcgtgaatcaaagattctcaaagatgactcaagatgtggagatgaaagagcaaccagctccgtccaattccgttccttcctcttctccatccactttgcaccatttgaaggaaattgcgtctctgattgagaccggtgcttatgaccgagaagctcgccgtattttgagggctatacgacttacaatggctttaagacggaagttgaaggcatccgtgctttcctctttccttagtttcgctcttacccctggatccgaggccttcactcgtctttcttcttatcttcctaaggtaatcttttgatggaacatcgtaatattcaattattaatgtggaagtgttttcccccttgggtgaagtgattgccattccatcctctt

SEQ ID NO: 52456 - DNA, 435 bp, Gossypium hirsutum
  Clone ID: LIB3197-054-Q1-M1-B7
gaaccctccatttctctctgcaaccagcggcacccaaagatgcaaatcttcgtcaaaaccctaacggggaagaccataaccctagaggttgagtcttccgacaccatcgacaatgtcaaagccaagatccaagacaaggaaggcatcccacccgaccaacagcgcttcatctttgccggcaagcagctcgaggacggccgcaccttagccgactacaacatccagaaggaatccaccctccatctcgtgctccgtcttaggggaggtgctaagaagagaaagaagaagacctacaccaagcccaagaagatcaagcacaagaagaagaaggtcaagctcgctgtgctacagttctacaaggtggatgaatcgggtaaggttcaaaagctgaggaaagagtgccctaatgctgagtgtggtgctggaactttcatg

SEQ ID NO: 52457 - DNA, 427 bp, Gossypium hirsutum
  Clone ID: LIB3197-054-Q1-M1-B8
ccctttagtttgggttttggcctcaaccttggagcgccaccgcaccaccatcggacttggtggccgactacgcgcagaagggacacgatgagaggctggaggtaagtattattctccctttcattctcttttgaaactgattttcttttttgatttctttttcgtgtttgataccatatttttttcccctttctccctttggagttcgaaatcgacgagggagggaggagttccagcgacgtgattcggtaaatccctttcctctccctttttatttttcgtatttatgtaaaaaacaaaaataaaaaaaataaacttaagattaaataaataatacgaaaatcactttaaaactttaaatcttttgcttttctattcccaattttcggaagaaaaaccagagagcccctctttatacaatcgattt

SEQ ID NO: 52458 - DNA, 456 bp, Gossypium hirsutum
  unsure (1)..(456): unsure at all n locations; Clone ID: LIB3197-054-Q1-M1-C1
aaaaaaactgagagctccttttaggccctctctcgttctcctttcctcctacctgggcaccagcgagctcgcgcggtggctctgccgtagctccgccgtggctccgccgtgccggagagcaataaaagtttttaaaagatacctttttaaaagcttccaaaaaaaggttttgtttcaaaaaaaaaagagcaaaagaaaaaggcaaatcgcaagtaaaacgaccttcctattcgtcgcactcccctaaccctcgtcgaaacccgaatgggttttgtgacatttgggttactagaggttcccaatcgcgtcggtggatgaaccgaaggtgaggtttttattactgttaatgcacttcatttcgaatcaaaacaganaagaaaaaaaaataaaaataaaagaggcacctttgagagtatttgatttctctggttttttgggaatctgttttcttttttt

SEQ ID NO: 52459 - DNA, 434 bp, Gossypium hirsutum
  Clone ID: LIB3197-054-Q1-M1-C10
cgagaatctgcccatgattgtcattggtacccgtgatgcatgcttgaccgagcggcgttcaaccattcaccaacttcatgccagatggtctcttaacatatctcacatttatcaagacattcgcctctggaatcattgtaccaaaatcttatatatggcctgtatatggagctctttacttgcaaccttctacctctattgtcttggatgctcacaaagaaaggctataacatattgcgtcggacttttataacgatgttccatacagcctcctgcactaatatgaacaagaagctatttttcgtcacagtgtttatataccaaagatctgtgtgtatgtggtgatagacctacttctaattactccagcagcagctatagattgttttgctcacatacgaaaaaatgcttcataacaagcggaccttttggtc

SEQ ID NO: 52460 - DNA, 439 bp, Gossypium hirsutum
  Clone ID: LIB3197-054-Q1-M1-C11
ggaatcgggtaggcttgaaaggtccaatggctactccaattggtaaaggtcatcggtctttgaatcttacactaaggaaagaacttaatctgtatgccaacgtcaggccttgttacagtctcccgggttataagactcggtacgatgatgtgaatcttatcactattcgtgaaaacactgaaggggagtacagtggactcgagcatcaagtagtgagaggtgtggttgaaagtctcaagattattactcgtcaggcaagcttaagggtggctgaatatgcttttcattatgctaagacccatggaagagagagagtttctgcaattcataaggccaatattatgcagaaaacagatggtctttttcttaagtgctgtcgtgaagttgcagagaaatatcctgagataacttacgaggaagtagtcattgacaattgctg

SEQ ID NO: 52461 - DNA, 156 bp, Gossypium hirsutum
  Clone ID: LIB3197-054-Q1-M1-C12
gaggtttttaattgatgtcctaaaatttaatgaactggttttcacttcccagttcatgtttctcaatcttgaatttaataaccaatccctgagttgtttgtccctaaaacctaaaccccaacttgaaagaaagaaatgaggaaagaggcagaaaag

SEQ ID NO: 52462 - DNA, 442 bp, Gossypium hirsutum
  Clone ID: LIB3197-054-Q1-M1-C2
cagagattgaaacagtgtttatctgtttttttcgagcattatgcttctctctcagaaaatcacaagaagtgtttgtctaaggctttcattcctgtcatgcgttctatgtggcctggaatagatgacaatcctggtggttcttcttatacggtctccaacatgcgtaagcatgccatacaagcttcaagattcatgctacagatgatgcaaactcccctatatgcaaaggggactgaagcagaggatgataatggttgtaatggatcaccagaaatcatagatggcccttcacagccttcagtagaatgcggagaagagggacttgcaattcgcatagccacagaggtgttgaggtttccagcaaagaagacacctgcagagaggtcatatgttgcggctctttgcagaatacttgcctctctccatttctgtttatcagaac

SEQ ID NO: 52463 - DNA, 376 bp, Gossypium hirsutum
  Clone ID: LIB3197-054-Q1-M1-C3
cgcgtccgcccacgcgtccgcaacaggcaagtacgagaagaaggtgtacgttttgcctaagcaccttgatgagaaggtggctgctcttcaccttggaaagcttggggctaacctcaccaagctcaccaaggatcaagctgactacattagcgtccccattgagggtccttacaagccccctcactacaggtactgaggagagaatacgagagagggagagagagtgagagagagagagggagagagttggactagaaaaaggaaccatacaacgggatggtttgtttttactaaaatttattgatgatttgtggttagatggttagattttgattttggtaggagtttgtgtgtggggtggatggtaagatttggt

SEQ ID NO: 52464 - DNA, 444 bp, Gossypium hirsutum
  Clone ID: LIB3197-054-Q1-M1-C4
gtttttctcgtccttaaaactctcttctaatttggtgccatctttggatctctcacttttctacctttcagatttcgtgaaacggagaggagatatctttattcttctgaacttgcaactggaagaggaaaatttcattacagcaactggtccaggccttttcgttcgtctttacggtacttccctccgtttgaacacttccagatctgaagaaaaatgcctcccgccgctcctcgatccggagatgcgatcttcgccagcgtagaacgcgtgaatgcagaactattcactttgacttatggagcaatagtgcgtcaattgcttactgacttggaggaggttgaggaggttaacaaacagcttgatcaaatgggctataatataggaattagactaattgatgagtttctagcaaaatcaaatgtgtccagatgtgttgacttt

SEQ ID NO: 52465 - DNA, 419 bp, Gossypium hirsutum
  Clone ID: LIB3197-054-Q1-M1-C5
gtgtccacagttcactccttcttgaagcagacgacaaaatatataatctctctcaacagcctcaagcccctctcttttttatgttttgtgcgtaaatggcatcatcccttctctctagaactcttttgggtcaccgcttaattcgattttcctcgtctctccctcagaaccccttgattttctctaatcttttcaataagagagagttccgtgtacaggctgagtcttaccataccacatataaggcctctggtcagcattctcgtttaatggcttctgcagcaattgagacaagaagtaatttttcgacacagtctctttctaccaatgatccggttgtttctgttgattggcttcatgctaatttaagggagcctgatttgaaggtattggatgcatcatggtacatgccagatgag

SEQ ID NO: 52466 - DNA, 445 bp, Gossypium hirsutum
  Clone ID: LIB3197-054-Q1-M1-C6
cccacgcgtccgcccacgcgtccgtttaataatggtcggcttagagaactaatcaccccttttcctaaccatcaaaatacccccatccttttttatattctaatcttcatcctttttgcagatcaacgatactctgggatttttcttttcagattcctaaatccaacaaatacctaaagcctttgagatatttatatagatcgatcgaaatcgaagacagcagggtggcttgagaaaagggtaagtctgggatttggtggttattggaagtaaatggcgaatctgtatgtgaaagcggtgccaccggcggatctgaaccggaacaccgagtggttcttgtacccaggagtatggactacttatattccaatcctattcttctcctggctccttgttctctccatcttcggctgctctcctggcatggcttggaccgtcgtcaatc

SEQ ID NO: 52467 - DNA, 303 bp, Gossypium hirsutum
  Clone ID: LIB3197-054-Q1-M1-C7
gcccacgcgtcgggacctgggttatcctaaagacggtggaagcccgtccagagcgctttcagcgcgagctttgaaagggaatcgggttaaaattgctgaaccgggacgcggtggctgacggcaacgatagggagttcggagacgtcggcgggggcctcgagaagagttatcttttctgtgaaacggcctggccaccctggaaacgggttaaccggaggcagggtccaacgtctgaaaaagcaccgtacgtgccgtggggtccggtgcgccctcggcgggcttcgaaaatccggaggaccgatt

SEQ ID NO: 52468 - DNA, 436 bp, Gossypium hirsutum
  Clone ID: LIB3197-054-Q1-M1-C8
gatcattgaagcttttcaaacttcaatagtccatggcgttgtcaaattccctttcctttccttcttctaacgccgtcgacctccgacgttccacggttcccgattccggcatcgccccttttttcacttcttttgactgttctagattccgctgcaacttttctcagtgcggcattaggcccaatttctctgcaagaaaacgcattgtttctgctgctaacaatggtttcaacacggttaattcaacttcattggggactggccaagataaagatgattatattccaatgccaattgttttgattgatcaagattcagattcagaagcaacagttgtgcagctgagttttggagatcgtttgggtgctctcattgacacgatgagagcattgaaagatttgggattggatgttgcaaagggaactgttgccactga

SEQ ID NO: 52469 - DNA, 448 bp, Gossypium hirsutum
  Clone ID: LIB3197-054-Q1-M1-C9
gaaacacagtgagggagaaatggtttctctgaagctacagaagcggctctccgcgagcgttctaaagtgtggaaaaggaaaggtttggctcgatcctaatgaagtcaacgagatctctatggcaaactcccgccagaacataaggaagttggttaaagatggttttatcatcaggaagccaaccaagattcactctcgatctcgtgctcgtcgcatgaaggaagccaagagaaagggacgtcactctggatatggtaagcgcaagggtacaagggaggcaaggttgcccacaaagatcttgtggatgagaaggatgcgtgtacttagacgcctactccgcaagtacagggaatcaaagaagattgacaagcacatgtaccatgacatgtacatgaaagtcaagggtaatgtgtttaagaacaagagagtcctcatggagagcatccac

SEQ ID NO: 52470 - DNA, 453 bp, Gossypium hirsutum
  Clone ID: LIB3197-054-Q1-M1-D1
gttgagattaatggatatgaagagtatagtggtatggagtatcggtctgctggatgtacagaggaatacaatgtcatgcagagagatcttgagcatgcaggagaagaggaatccgttctgttagaaggtgatattggtggcggtttggttcttcagcggcagataaccgttccgaaagataatccaaaagttttgcgcattgaatccagtattttagctcgcaaagttggtgctggatctggcggattttcaaggctggtttgcttgagagttcatccaactttctctctcttgcacccaacagaaacttttgtggcatttacctctgttgatggcactaagcaggaagtttggcctgaaactggagaaaaagtttaccaagggaatcttttgcctaacggtgaatggaagctcgttgacaaatgtctcggtttagtgctcatcaatcgattt

SEQ ID NO: 52471 - DNA, 443 bp, Gossypium hirsutum
  Clone ID: LIB3197-054-Q1-M1-D11
cagaaaacaaccataacatggaggagggaacgctagagatcggcatggaatatagaactgtttccggagtggctgggccattggtaatccttgataaagtgaagggacccaagtatcaagaaattgttaatattcgtttaggggatggaacaaccagacgtggtcaagtcctagaagttgatggagaaaaggccgttgttcaggtatttgaaggaacatctggaattgacaacaaatatacgactgtgcaatttacaggagaggttttgaaaactcctgtttctttggatatgcttgggcgcattttcaatggctctggaaagccaatcgataacgggccacctatcttgcctgaagcatatttggatatttctgggagttctattaatcctagtgagagaacctatcctgaagaaatgatacagacagggatttcaacaatt

SEQ ID NO: 52472 - DNA, 433 bp, Gossypium hirsutum
  Clone ID: LIB3197-054-Q1-M1-D12
ctacaacacacttgctagtattcctacttggagtggtgactctcaccactcccacatttggtacctatgagtcaccaaattatgggaaaccccctactcctgtattcaagcctcccaaggtgaaaccaccaccatatgaacctaagccaccagtgtatgaaccaccaaaaaaggagaagcctgaacctaagccaccggtttatgcacctccaaagaaagagaagcatggacccaaaccaccaatgtatgaacctccaaagaaggagaagcctgagccaaagccaccagtttatacacctccaaagaaagaggagcctaaacctaaaccaccagtatatgaacctccaaagaaggagaaacctgagccaaaaccaccgatttatacacctccaaagaaagagaaacctgaacccaaaccacccgtatatgaacc

SEQ ID NO: 52473 - DNA, 445 bp, Gossypium hirsutum
  unsure (1)..(445): unsure at all n locations; Clone ID: LIB3197-054-Q1-M1-D2
gtaatttacaagttgatcaaataggagatactcattagagctgtgatagaaaggatcaataaagatcgttttgggaatggcttgtcgaggatgcttagagtgcttgttgaagctcttgaactttttgatgactcttgctggtctggcaatggttggatacgggatctatttgtttgttgagtacaaaaatgctgccgatactgcaatgcttttgtcacctgttggtagtgatcgagatttgatacagtttggtcgccccatgctcatggctgtgtctctttcgtctagtatttttgataatctgccaaaagcatggtttatatatttatttattggagtaggggcggntctctttgttatctcttgttttggttgtattggagctgcaacacggaatatatgctgcttgacttgttattcagttttggtgatcttgctgatcttg

SEQ ID NO: 52474 - DNA, 451 bp, Gossypium hirsutum
  Clone ID: LIB3197-054-Q1-M1-D3
cccacgcgtccgcccacgcgtccgcccacgcgtccgcccacgcgtccggagcaaacaagttctcagagagacaacctattgggacatcagcccagacagacaaggactacaaggagccaccagcagcacccttctttgagcctggtgaactcaaatcatggtctttttacagagctggtattgccgagtttgtagccaccttcttgttcctttacatcaccgtcttgactgtcatgggtgtgtctcagtctaaaaccaaatgtgcaaccgttggtattcaaggcattgcttgggcttttggtggcatgatctttgcccttgtttactgtactgccggcatttcaggtggtcatattaaccctgctgtgacctttggattgtttctagcaaggaaactgtcacttacaagggcattgttctatatgatcatgcagtgcctgggtgctatctg

SEQ ID NO: 52475 - DNA, 450 bp, Gossypium hirsutum
  Clone ID: LIB3197-054-Q1-M1-D4
gtttcgacaaaatcaaacggttacgaacactaggagttccaaaaaggggcacacccgatattcacctccttcaaaagttttggcattttcattttcgtctccactaaaaaaagccctgcgtccttcgaatcgattccattcgatttcaccatcttttaaatcctatcaatttctcagatctttcccagtcttttctgcaaccatgagtaagggaccaggactcttcgtcgatatcggcaagaaagccaaagatctgttgactaaagattatacctcggatcagaagttcactgtttctacttacactggcgctggagttgcccttacatcaactgctctaaagaaaggaggactttctactggggatgttgctgcattatacaagtacaagaatactcaattcgatgtcaaagttgataccaactctaacatctccacaacacttacatt

SEQ ID NO: 52476 - DNA, 440 bp, Gossypium hirsutum
  unsure (1)..(440): unsure at all n locations; Clone ID: LIB3197-054-Q1-M1-D5
gaaaatagatgttgtcttttttggggcaaaattggcacggagaagggctggagcttgcgtctaaaggcgtgtacgagtacgagtgctgcaactgcaagcaatcctttcatcctctgcaaccttctactattctacgagaatggcgagaacagaaaatttgaataacttcattgttggggatttgccaacattgttctacatccctgacttcatcacagattctgagcaagctcggctcctaaataatatttaccaagcacctatatcaaagtggaaatctttgaagaataggagactccagaattggggcggtgttgttcatgaaaagggtcttctgtcacaagatttgccaccttggctagctaagattacaaaaagaatatgtgaagaatcaggactttntccttcagcaatcaaccatgttcttatcaatgaatacc

SEQ ID NO: 52477 - DNA, 431 bp, Gossypium hirsutum
  Clone ID: LIB3197-054-Q1-M1-D6
aaaaaggaaagaaaaaaatgaagctcttgtttctaactttgctgctttgttctcttcttctatgttcttcagtttttgcaccaacaatggctcagcctcgttcacgtaagcaaacatatttttttcataatctaagccttgggtgtgtgtgtgtgtgttttaatctttgatgtaattttttttggggggggggaatggcagctttttgtgaagggaaatgcaaagggaggtgcaataaagcggcggtttgggatcggtgcttcaaatattgcggcatatgttgcgaggagtgtcaatgcgttccgtccggtacttacgggaacaaacacgagtgtccttgctacagagataaggtgaacaacaagggcaaacccaaatgcccttgaaaatgaaatatattcgagttcgggatttaatcaagcttaaagatc

SEQ ID NO: 52478 - DNA, 443 bp, Gossypium hirsutum
  Clone ID: LIB3197-054-Q1-M1-D7
cggacgcgtgggcagcaagatggaagtgccctttttcccaacccttttctcctgtatcaaagacttggtggtgcaacaagccttgttctcaaccttggaggattggctagtgaagcatcccaaaatcctccagttttcatgggaaaatggccaaacaccagcttctctcatcgcttcctcaccctcactgtcttgtcttacatctctttcaccttcgttctctcccaattatctcgcccttcactttcacgtccactcttcaaatcaatcacagccgtcgacaacatcttcctccttaccctttctttcaccatggccctgggttgcctcgcttccaacttctcccaggtgcctaacttcaagaacctcgtttgcttccctaggggtacatccccatcgggccctctctttttctgggcatacatcttctacctctccaagat

SEQ ID NO: 52479 - DNA, 349 bp, Gossypium hirsutum
  Clone ID: LIB3197-054-Q1-M1-D8
cgttgatattgcaactcatcagcatggctgttgcgttttgcaacgatgcattagccattcaaatggtgagtatcgagataagttggttgaagaaatatccaccaatgggcttatactagcacaggatgcatatggaaattatgttgttcagtttatcttggagttaaaaatcccatctgacacttcaactttggtttttaaatttcaagggaactatgtacacctctcatcttaaaagtttagcagtcatgtggttgaaaagtgtattgtggtattaaatgacgagagccggtcaataatcatccgtgaattgctctctgtaacacaattctaacggttgttacaagat

SEQ ID NO: 52480 - DNA, 453 bp, Gossypium hirsutum
  Clone ID: LIB3197-054-Q1-M1-E1
aaaaaaaatggtttagatataaatttgtatatatgcgttatattttcatttcacttgacgagcttaggtaatttgttttgaaggtgacaaacaacagcacaccacacagcagcgcattttcttgttcttgttcttcttctagttgtttccaatggaaaagctggaacacctcaaatctgccgtcgctgctctttctgaaatcagtgaaaatgagaaaaacggattcatcaaccttgtctcccgctatctcagtggagaagctcagcacatagagtggagtaagatccagactccaactgatgaagtggttgttccttatgacaccttgtctccctctcctgatgatcctgctgaaaccaagaagctcttggacaaacttgttgtcttaaagcttaatggaggtcttggaaccactatgggatgtactggtcccaaatccgtcattgaagttcg

SEQ ID NO: 52481 - DNA, 438 bp, Gossypium hirsutum
  Clone ID: LIB3197-054-Q1-M1-E10
acgccccttcttacttttatcattcaataattttcatcaacgaagaaaaatgagagagtgtatttcgattcacattggccaggccggaattcaggtcggaaatgcttgttgggaactttactgtctcgagcatggcattcagcctgatggacaaatgcctagtgacaagactgttggtggaggagacgatgctttcaacacctttttcagcgaaaccggtgccggaaaacacgtccctcgagctatatttgttgatctggagcctactgttatcgatgaagtgaggactggaacataccgccaactgttccaccctgagcaactcatcagcggtaaagaagacgctgcaaacaattttgctcgtggccattatacaattggaaaagagattgttgacctctgcttggatcgtatccgaaagcttgctgataattgtac

SEQ ID NO: 52482 - DNA, 386 bp, Gossypium hirsutum
  Clone ID: LIB3197-054-Q1-M1-E11
atctagctgctaggctgtacttctattactctctttgctatgagctcacgggtgatcttgctgaaattaggggtaaccttctatccctgcatcggattgcaacattgcgccatgacgagctgggtcaggagacacttctcaacctgctacttcgcaattacctccattacaatttgtatgatcaagctgagaaactgagatcaaaggcacctagatttgaagctcactcaaatcagcagttttgctcggtacctttcttacttggggaagattaggacaatccaattggagtacactgatgccaaagagtgtcttcttacaagctgctcggaaagcccctattgcagtctctggttttcgggttcaatgcaacaaatgggcaatca

SEQ ID NO: 52483 - DNA, 444 bp, Gossypium hirsutum
  Clone ID: LIB3197-054-Q1-M1-E12
aaatagagaaaaaaaagtatcattaaacaccttcaccaacaagaacaaaaaaaacaggtgaaaccccgttttcttttggtctcaaaacgattcaaaagggcaagattcttggttttagggtttgggttttcattgatttttagtgaaaaaattataaaaaaattatgggaagaggtagggttgaacttaagaggattgaaaacaagatcaacaggcaagtcacttttgcaaagagaagaaatggtcttttgaagaaagcttatgagctttccgttctttgtgatgctgaagttgctctcatcatcttctccaatagaagaaagttgtacgaattttgcagcagctcaagcatgatcaaaacattggagaggtaccaaaaatgcaactatggagctcctgagccaaatgtgtcatcgagggaggctgctttggaattaagcagtc

SEQ ID NO: 52484 - DNA, 442 bp, Gossypium hirsutum
  Clone ID: LIB3197-054-Q1-M1-E2
catttgcgtcgaccccatttcgcatgaggatgtttctgctaccgttttggccacttacgtttatcataatgctagtgatgtggggttggtctaagaccttcctcttctctttctacaatcttcgttgccgtttgcaccagacatgggtcgttcctaggttcggctttcagtatttcttaccatttgcaacaaagggcatcaacaagcacatagaggaagccatattaagggcggacagattgggggtcaaggttattagcctcgccgctttaaataagaacgaggctctgaacggaggagggacactgtttgttaacaagcatccagagcttaaagtgagagtggttcatggcaataccttgacggctgcggttatccttaatgaattttccaaggatgttaaagaagtgtttctaacaggagccacctcaaagctcggtag

SEQ ID NO: 52485 - DNA, 388 bp, Gossypium hirsutum
  Clone ID: LIB3197-054-Q1-M1-E3
ttttgctttctcttgctctgcttttgcatctttcttgttttgatcatctcataccataacttgcatatttttactgctcagggagtcaaattaagatcatctttcatacccagatctctatttttaaggttttggaagggaattggagttggctatggagaataaccagcaatctttttggcattatagtgatcaacttaggatccaaaattccaatctgtctaaagtatttattacctattgtatatggagcatcagatatgtctctataatgcctgatgaaaggaggaattttgatatctgaatctgtggtgaagttaattctggtatcaactttaaacccaaaggcttttattttaatcctttcaacaatgatggtaggaaaatt

SEQ ID NO: 52486 - DNA, 444 bp, Gossypium hirsutum
  Clone ID: LIB3197-054-Q1-M1-E4
attctcgactcactcttcccacttcttcgaagtctttctactgctgcaaatccctgtcttcccctacttcaccttctcccctcagatcccgatctagggtttcgccgccaattcttttttcgcatttcgatcgctcttttttcttaccttaaatggcgattgcagcccaagctccagatattctcggcgagcgtcaatctggtcaggatgttcgcactcaaaacgtgatggcgtgtcaagcagttgccaacattgttaaatcctcactcggcccggttggactcgacaagatgcttgttgatgacattggtgatgtaacgattactaatgatggtgctacgatcctgaagatgttggaagtagagcatccagctgccaaggtacttgtagagttggctgagcttcaagatcgagaaagtggtgatggaacaacctctgttgtta

SEQ ID NO: 52487 - DNA, 447 bp, Gossypium hirsutum
  Clone ID: LIB3197-054-Q1-M1-E5
gtgaaactaaaaagacaaggctaggaaagcaatctctaagcaaacgaactgagaaacagcttttcggcttccccgccgatctctccaaattctattttcaaatcgaagtcaacaatcaattgtaaagcactttctcctctctttcctaaggaaaggagatgaagcgagtcttcggcgttaagaaagacaaggaaccgccgccttcgattcaagatgcctccgataggataaataaaagaggggacaatgtggaggagaagttgaagaaactggatgctgagcttagtaggtacaaggaacagataaagaagacaaggcctggccctgctcaagaggccattaaagctcgagccatgagggttctcaagcaaaaacgaatgtatgaagggcaacgtgatatgctttacagtcagacgttcaacctcgatcaagttgcttttgcttctg

SEQ ID NO: 52488 - DNA, 447 bp, Gossypium hirsutum
  Clone ID: LIB3197-054-Q1-M1-E6
ttcaaatcgcagggcttttttaacctctccctctctctctagaaccctcactattcttttcttttgtttgtttatatggcatctcaagccagcctcctccttcaaaaacagctcaaagatctttgtaagaatccggttgatgggttctcggccggattggttgatgaaaacaatatctttgaatggagtgttacaattatcggaccacctgatactctttatgaagggggatttttcaatgccatcatgagctttccgcccaattatccaaacagccctccaacagtgaaatttacatcagagatttggcatcctaatgtttatcctgatgggcgtgtttgcatatcaattcttcatcctccaggtgatgatccaaatggttacgagcttgcaagtgagcgctggatgccagtccatacagttgaaagtattgtattgagtatcata

SEQ ID NO: 52489 - DNA, 424 bp, Gossypium hirsutum
  Clone ID: LIB3197-054-Q1-M1-E7
caatactaaacgtacgtcaatgatcattccactattattagtgtccaaagagttgtataaaaaccagatgcatggatgcatgaacttaagacattggcttatagaaaattttgcatgccaacatttggacagtttaagataaggtagaattgaaacctgtgccaatacttaatagctcatccaatacagactagggctcacgttggctgaagcttttgcattgatttcacgataaaaacagcacaatttctggctcaaaaacttggtccacgaaggggaggaatggattgtgaggaagtttcgctttttgctttctacaagttctggtaggatttaatcacccaatttaaatggttcctagaacagttaagaccataaggaatctgaatcaaaacatgattttttttcccccacaagccttttg

SEQ ID NO: 52490 - DNA, 436 bp, Gossypium hirsutum
  Clone ID: LIB3197-054-Q1-M1-E8
ggcgattcctaaacgaaaccctattttcctatctgtaatctttgtttcgctcctcgccatcgcctccgctaaagtattcttcgaagaacgttttgatgagggatgggaaagtcggtgggtaaaatctgactggaaaaaggatgagaacatggctggggagtggaattacacttctggaaaatggaatggagatcctaacgacaaaggtattcaaactagtgaagactacaggttctatgctatttcagctgagttcccagaagtcaacaacaaagataagactctagtcttccaattttctgtcaagcatgagcaaaagcttgattgtggtggtggctacatgaagttgctcagcggtgacattgaccagaaaaaatttggtggtgaaaccccatacagcatcatgtttgggcctgatatctgcggctatagcact

SEQ ID NO: 52491 - DNA, 443 bp, Gossypium hirsutum
  Clone ID: LIB3197-054-Q1-M1-E9
cttttataagcaatcctttcctttacactctaccctcactatcatccctcctttcttatttttccctttttggttcctctctttctgtccttactttgtgatggaattaggaagtgctcttcagttccttgataacaaatccattctagtcactggtggaactgggtttttggcaaagatatttgtggagaaaatattaagagttcaacccaatgtcaagaaattatatcttctcgtaagagcagccgaccataaatccgccatccatcgtttgcaccatgagatcgtagggaaggatctgttcagaaatctgaaaaagaaatgtgggaccaatttcagctcttttatatcacaaaaaattacagttataccaggtgacttaacccatcaagatttgggtctccatgattctgatttgcttcaactcctttgcaaggaactcg

SEQ ID NO: 52492 - DNA, 448 bp, Gossypium hirsutum
  Clone ID: LIB3197-054-Q1-M1-F1
tttctctcttttattattgtccgttgacaccgcaaatagaagagaagagtaatggccggcaaaggagaaggtccagcgattgggattgatctcggaacaacttattcttgcgttggcgtttggcaacatgatcgtgttgagatcatcgccaacgatcaaggtaacaggaccacgccgtcttatgttggctttactgataccgagcgtttgatcggtgacgcggcaaagaaccaggtcgccatgaaccccttgaacaccgtatttgatgcaaagaggttgattggtcgtagattcagcgatgccgctgttcagagtgatattaaattgtggccattcaaggtcataccaggatctggtgataaaccgatgattgtagtttcttacaaaggtgaggagaagcaatttgccgctgaagagatctcgtctatggtcctcaataagatgcgtg

SEQ ID NO: 52493 - DNA, 443 bp, Gossypium hirsutum
  Clone ID: LIB3197-054-Q1-M1-F10
gaaaagaagaggaaaaaccagaaaaatggcgaaaccccaacttttatttctattttccttttcccttctctgtctcatttctttttccgccgccgattcctccatcacagccgacttacgtctcaccgattccagtttcccgtcggttcatgcgaagaagctgattatggagttgaatttgtttcctaaaggggaagtcaatgtcgttgacgaacaccgggtttcgttgccggagggtcccaaactggtggagaagcggttcaagttcccaactttggaagtgcccggtggagtttcctttgaggatttgggtcaccatgctgggtattacaagctttctaattctcatgatgccagaatgttctacttcttcttctaatcacgcaatagcaaaatggaccctgttgtaatctggttgactggagggccaggttgtatcattg

SEQ ID NO: 52494 - DNA, 427 bp, Gossypium hirsutum
  Clone ID: LIB3197-054-Q1-M1-F11
actaccctcaaggaatctacagatctctgtccctctttctctacgtctcaaaccctaattccttaatttttacagaagatcgggggtttaatcgcggagaatcaaccatgtttaacaggcttttcgggaaacccaagcaggaagcaaatgctctaaccacgttagacaaattaaatgagacccttgaaatgcttgagaagaaggagaaagtacttgcgaaaaaggctgctgctgaggttgaaaaggccaaggaatttgccaaagggagaaacaagagagcggctatacagtgcttgaagaggaagagactatatgaacagcaaatagagcagcttggaaacttccagcttcgtattcatgatcaaatgataatgttataaggtgcttaagccacaactgtaactgaaaattcattgagaactggagc

SEQ ID NO: 52495 - DNA, 445 bp, Gossypium hirsutum
  Clone ID: LIB3197-054-Q1-M1-F12
gacaggaagtgttcgcgttgaaagagatcggcgtggagaactccatcggtattttcaagaaagcggccaagcctttggtggttaaaggtgaggggcatcagataccgttcgatgataattcttttgacttcatattctccggaggagctcgcctcgacgcatctgctcgcccggcggatttcgcgttggaaatagctcggaccctgaaacccgaagggtttgtggtggtccacgtcaaggctaatgatacatacagtttcaattcattacttgatttgttcagttctttcaatttagttaaaacgatcgacatggctggtttcgattcatcaatgccttatattagagagattgtgttgagaaaagatactgtaattcgtaaccatgggggtagaaagattcccgatggtgtttccggtaataagtgctcggttccggggcacaa

SEQ ID NO: 52496 - DNA, 335 bp, Gossypium hirsutum
  Clone ID: LIB3197-054-Q1-M1-F2
acgcatgtgtctcaaattatagtccggttacaccgcaaagcgaagagaagagtaatgaccgtcgaaggagaaggtccagcgactgggatagatctcggagacaacttattcttgcgttggcagaaggcatcatgatcgtgttgagatcatcgccaatgatcaatgtaacgaaataatgccgatttatgttgactgcactgatactgagcgatagatcggtgacattgcataaaaccttgttgacatgaacacacttgaacaccttatttgatgcatagaaagtgattgtctcgattatatcagcgattgctgcttgttccacagtgaatattaaa

SEQ ID NO: 52497 - DNA, 445 bp, Gossypium hirsutum
  Clone ID: LIB3197-054-Q1-M1-F4
gccagcagtagaatcaaaaaagagacccgacaaaagcgggtcaagtaatccaggaaacatttaccgagtttttagattctttatttgtttcatttaactcagtgactcactcgtcaccctacactcttttctttttccacatccaacgctttctttctctctctaccattgaagttctttcttactcagatccaggtgacatattgttttaattagggttgtgaaagtgtggatggtacaacaactcagtgtgcagttatcagccagtctcatcccttaattattaaagtgggggcactaggaagtttcccatagcatttgccagagatatttctacaattggaatttagaaggtttagaaatcaggagtgagcaatggaagaaatacagtctcaatcggacaattataggtcttcttcctcctcagccagtagtcctgcaagta

SEQ ID NO: 52498 - DNA, 332 bp, Gossypium hirsutum
  Clone ID: LIB3197-054-Q1-M1-F5
tcggcccaacatactgttaaagaaaaaagctctcacaggatacagctccaatggctacttgtaccaccacaccttcatcatcgttgatgataacatacgccgccgcatctactgtacacgcccaagcccttacttgttccgttctatccttcaagtctaacatgcctaccttttgtattagcctacttgcttctcaagatttctatagacagttaatctcacatcaattgttctaatttatgtccctatagagatttcatgcaccttgtgtaggctgtcttttcttgtttaagctgaggtggctgttgttactctactataatgatggtgtg

SEQ ID NO: 52499 - DNA, 449 bp, Gossypium hirsutum
  Clone ID: LIB3197-054-Q1-M1-F6
aaaatagagagaaaccctagaagtttgaatttgtggagacaatatgatactgaggactccaccacccaagaagcaaagagccgaacccatacttcacgagagtccgtctccgcaagtagcttccgagggacgtctcgtcatctatgaggacaatcctctggcggtgcctccgccggagtcgcctcaccagccctctgatcacctcctctgcacttatcaatgccgtcagatggttaaagcagattttatagatgccttgagcaatgcggagaagcaaattcgtgattatcagtccaaactagagattttaaatgaaaacctttctaaagccgaagcagaaaggaaaaagtttagggatcaattcctttatgcagaacaagagctagctgctgcaaaaggacgtgaacagatgctgcatgaccagctcttgaaggaagtcaatgattcac

SEQ ID NO: 52500 - DNA, 440 bp, Gossypium hirsutum
  Clone ID: LIB3197-054-Q1-M1-F7
gtccaagtttcatttttgttttttcgttaggcttatattcttcaactgttcaactttgatcgaatactttgttttgttttgtttttcatgtaataaatctgccctcgttgctctatagctcccaaagtttgatttttttttctccttgtttgttttcatgaattactgtgtctcttcttcactgtctcttagtataccacaaatctaaaatctatttttttaaaattatttgatgcaagacttgaagtgggtatttgaagaaaccaccattgttgctcaagtgaagctgcttttatagtagttgaggttatctgctccagtgcagcagcacccaaatatctgcaatgagaaagaagttagcttcagtgcttcttttgtctcttgttacaagggtttttagcaccactgactcttgtgaccttgatgttttaatgcaattc

SEQ ID NO: 52501 - DNA, 436 bp, Gossypium hirsutum
  Clone ID: LIB3197-054-Q1-M1-F8
gccatggagaaagttggcaaagaaggtgttattaccattgctgatgggaaaaccttgtacaatgaattagaggttgttgagggaatgaagcttgatagaggctacatatccccttactttatcaccaaccagaagaaccagaaatgtgaattggagaacccacttattttgatccatgagaaaaagatctctaacttgcctgctttggtgaaatttttggaattgtccttgacgaagcaaaggcctttactaattgttgctgaagatcttgaaagtgaagcacttgcaactctcattctgaacaagcttcgtgccggaatcaaggtgtgtgccattaaggccccaggttttggggaaaataggaaagctggcttgcaggaccttgctgctcttaccgggggcgaggtaataactgaagaaacttgtcttgacattg

SEQ ID NO: 52502 - DNA, 379 bp, Gossypium hirsutum
  Clone ID: LIB3197-054-Q1-M1-F9
cccccatagattcaaaatcttcctagtgttcatattactctaaatgagtatacctgtttttaaacactagttttcgatccgatgctggaatcctatactccctcgaaaacgtttctcggcagttcgtatttgactttactgcttttgatcccgttaacgaacaaaatagtcgagtaaagctaattatcggtggcagctttggtgtctgtcagaatagtcagagttgcactcatgtaattgttgataagattgtctacgatgatcactgatggttagctgctcgaaacgattgcttaacattagttactgggttatgggtttgatcatagttttgatattggaatgcctgttgatgctacttcgattatgtacagaccta

SEQ ID NO: 52503 - DNA, 450 bp, Gossypium hirsutum
  Clone ID: LIB3197-054-Q1-M1-G1
gacagaaaactaagatagctaaaaactatatagctctacctttggtgtagtttttaatttctatatgatttcctttcaagcccccctctccccttcagatatgatcggaaagacaatctcagagttcgacaattcatccaggaagagaaagttggaagaagattcacaaggtgatcatgaagaaacttctgagaagcgatctaaagctgaaagcataaaatcggtgttcgatatggagctacacctcgagactccattacctttggagtggcaaagatgtttagacattcagtcagggcagatacacttttacaatacaaggacccatacgagaacatcaaaggatccaaggagaagccctgaacccccaagccccgttcacatgagcttagaccttgagctaaacctaccatgcgattcatcagtaaggaaaagtaatgaaaaagatca

SEQ ID NO: 52504 - DNA, 426 bp, Gossypium hirsutum
  Clone ID: LIB3197-054-Q1-M1-G2
gtcagataagcagagaaaatggaggctgccagaactgttaaggacgtttcccctcatgacttcgtcaaggcttacgccgcccatctcaagcgttccggcaagatcgagcttccttcatggactgatattgtgaagactggtaaactcaaggaacttcctccctacgatccagattggtactatatcagagctgcttccatggcaaggaagatatacttgaggggaggtcttggtgttggtgcctttaggaggatttatggaggggctaagagaaatggaagtcgccctcgccatttctgcaagagtagtggatctgttgcccgtcacattcttcagcaattgcagaatgtgaacatcattgatattgatcctaaaggtggaaggagaatcacatcaaacggtcagcgtgatctggaccaagtagct

SEQ ID NO: 52505 - DNA, 328 bp, Gossypium hirsutum
  Clone ID: LIB3197-054-Q1-M1-G3
taacctaaagatactagcacatcaaacatgaaagaaagcgaaactgtggaaagcgattcggtcaggtttttcagcatctagagtttctgtcaatgttggagaagagtgctcgaaagctcgcggaggttggagatcattggagcatcatcacactattctctagcttattttaggtatatatagtaaaatcattttggtctaatgccatgtataagctaatttggccatatatggcttaaatatgtggtttgtaatctagccattggaatggctagtaatggttgtttttgatatacttgtaatgtcatactatggtgtctacctttaa

SEQ ID NO: 52506 - DNA, 447 bp, Gossypium hirsutum
  Clone ID: LIB3197-054-Q1-M1-G4
agcaaacaagcgtcaatactgctgtgaagccgcagaggcgtgaagtgaagtgaagtgcattctggctggtcgacaatggggatttcgaggtttgttttactcgtgtttacgatctcaatgctggcatctccggcactctccgatctggttctctccaaagtcgatcgacgtatttatttgacatcccacattgttcgaatttcttcaactttagaggtggagaatgcaggtccagagactgtgtctaaggttttgttggcttttcctgaccttcaagcccaaaacttggcatatttgatggcttccccgcatgaagccaaagcgaaattcaaagtctctgttgtttctttccctattgatgtcgtcaaaccagaagatatgcctcctggtgtgacattctattcggtatcattgccacagggattaaccgtgggcgcttgcttgact

SEQ ID NO: 52507 - DNA, 299 bp, Gossypium hirsutum
  Clone ID: LIB3197-054-Q1-M1-G7
aaatatattagtgttgcaagtttttagtgaatagcaccctaagtaatcttcttgcttgttcaaatgcaatctctaatctcagcatagtaaatctgatctcctcagcgattcatacaacgctcttaactgatacctgttatttttatcccctgatttaatcaacttataaggttttattatttactatatgtagaaacttatttctgtttgtggatactatgcatatgtcttcatttaattgtgtctaactttttatatcttttatcttatcacttattgttcattgtatttttctttat

SEQ ID NO: 52508 - DNA, 394 bp, Gossypium hirsutum
  Clone ID: LIB3197-054-Q1-M1-G8
gaaagatcggggccgttgaaacctagcgtcgagaccgttgagggaacggttaagagtgtggttggaccggtttatgataaataccatgatgtccctgttgaattccttaaattcgttgattccaaggtgggtgaatcagtgaccaagcttgatcgtcgagtccctccagtcatcaaacaggtctcaaccgaagccatcttggcagcccaaaaggctcccgaggttgctcgtggcgtggcttccgaagtccaccgtgctggagtggtgaacaccgcctcaggattagcaaaatcagtgtacaccaagtatgaacccacagcaaaagagctttatgcgaagtatgaacccaaagctgaacaatgtgcggtttcagcttggcgtaaactcaacatgc

SEQ ID NO: 52509 - DNA, 415 bp, Gossypium hirsutum
  Clone ID: LIB3197-054-Q1-M1-G9
gaagaatcaccctatgtggtgcatctaacgcacctaaccacacccgagtctatttatcatctccgccttggatttgcctctttcgcctctaaaccatacacaccacaacttggcacatgtggctcctttggcctgtcacactgtgttccatgatgcttacctggatatattgttccacttttgttgtcgaaagcaatcggtttcataatatcatactacagacctgggctatacccaagtacaacatacagtaccgctcgaaatcgcaaaaacaatccatcaataacttgattgaagaagccatattagaggcagaggaaaaaggtgctagagtgttgagtctaggcctcatgaaccagggtgaagagctgaacatgtatggtggggtgtacatgcaaaagcatccccagcttaa

SEQ ID NO: 52510 - DNA, 453 bp, Gossypium hirsutum
  Clone ID: LIB3197-054-Q1-M1-H1
cccacgcgtccgcggacgcgtgggttggaatggacagtggttttcagaagaaatcaagctcaaattcctcaaaagtgcagatccaggaaaccgatgaagctaggaaaaaattctcaaatgctaaatctatttcatcagcccaattttttggtgaccaaaccagagcagctgacaatgaagctcaagttactttgcagaaattctcaagctcaacagccatctccagctctgatctatttggtcaaggtgcagataatgctcttgaccttactgctagtgacctcatcaaccgactctctttccaggcacagcaggatatctcgagccttaagaacatagcaggagagaccggaaagaagctgagctcctttgcgtccacttttatgagtgatttccaggacagaatcctgtaatggagtgttctggccttgaaaatctatatatatgatatat

SEQ ID NO: 52511 - DNA, 408 bp, Gossypium hirsutum
  Clone ID: LIB3197-054-Q1-M1-H10
ctcaaaggtagccgtcaaaaacagggattaccgactaaggagctgacagtgacatgggcccctgatgtttatgatcctctgccaacatccgttttgcacacagttagaggcaaaaaagcagcagaagttgaagaagaacagtgataagaagaaaaaaggaaagaaatggcacaagggaaacaactccttgcgtggtggtggtaaagacaacaaacagtttcacagaggtggtgggagtttggataagtggtataactacaaaccacttgagcttcatggtacggtagtcaacgatgcctcaggcaaccttgatggttttaaggttggcagtacagacccctactgtgggactagttatctgaaaaattcactcactagaatgcactactctgtggcggaggctttatg

SEQ ID NO: 52512 - DNA, 440 bp, Gossypium hirsutum
  Clone ID: LIB3197-054-Q1-M1-H11
agcatacagagatggagaggcaaagaagcaagcaggtttgtttgttgatgtgggttttggttgctgcctttttctcccacaatagggtcattgcagtgacctccactggccttggtgagcagaaaaactactatccagctcctgaccctcatgctggaactcccccttcaggttcacatggcacaccaccatcttcaggaggtggatcacctccctctcatggaaccccgtcacatggaggtggttaccacccttcaccaacaccatcaacgccttcgggtggaaattgtggaactcccccacatgacccttcaactccatcaacaccatcacacactcctcctcatggtactccaccatcatctggaggtggtagtcccccatcgtatggaggaggcagtcccccatcgtatggaggaggcagtcccccatcgtatgga

SEQ ID NO: 52513 - DNA, 410 bp, Gossypium hirsutum
  Clone ID: LIB3197-054-Q1-M1-H12
cttcctcttctccctcttcttaggtgaggagcaacatgttgttgaagggtcaagggtgtggacctttggtttcagacccaagatgttgtttgtgttcggggattcctacgctgatacagggaacaacaggaaagctttggcaagttcctggaaacttccttatggaattacattccccgggaaacctgctggccgtttctctgatggtcgtgttttgactgatttcatcgctgggtacttggcgattaagacaccagtgccctacagatacaggaaagaactggggggtcgtctcaagtatgggttgaactttgcttatggaggaaccggtgttttcgacacgccagctcctgagccaaacatgacaacccagatcgatttcttgcaacagcttctcaatgactcggtct

SEQ ID NO: 52514 - DNA, 443 bp, Gossypium hirsutum
  unsure (1)..(443): unsure at all n locations; Clone ID: LIB3197-054-Q1-M1-H2
gtcagccaattgtttgagctagctagctcttactcaaatggcaaccaaaacgatgatgttgcaaatatttccacttttcttctttttgttcagtgtctgcaactccattttccttggtgctaatggagatgacaatggtggttggcaaactgcccatgccaccttctacggtggtgctgatgctaccggcacaatggggggagcttgtggttatggaaacctgtacagtcaagggtatggaacgagcacagcagctttgagcactgcacttttcaacaatggcttgagctgcggtgcctgctacgagctccggtgcaacaatgatcctcaatggtgcattagtcgaaccataaccgtgacagccaccaacttttgtccacctaactatgctntatctagtgacaatggcgggtggtgcaatcccccacgagaacactttgatt

SEQ ID NO: 52515 - DNA, 450 bp, Gossypium hirsutum
  Clone ID: LIB3197-054-Q1-M1-H3
acggaaattaagagtagcattgcagtttcctcaatattgtgttggcaacatcgccaaactttttcgtttactttcatcttcggtccctccgaagatctttaccaaacacaaaaaaaaaccctgaaattgaacttttgttttagctcaagttttgcatgaacttatcgatacttatctgaaatctgctttacttggattttattctttttcattctttaggcaaacgcagatgccaaaatttttcctttctgctgttttaaagagtgtttattggttacttcattttaattttttggtattgttgagtgtaaatggccaatgcatctgggtttttcacgccttcagttccaaggctgaggagcaagattcagccttcaataggcgtttctcgatctgggttttgcttctctggtggaatctcgaggagggtagtgtgctcaagtgccattg

SEQ ID NO: 52516 - DNA, 415 bp, Gossypium hirsutum
  Clone ID: LIB3197-054-Q1-M1-H5
gtggtggtgagatattgaatatcgcacatttgagtagtattgattgatcgagtagttgaatgatgaggagctggaaagtgttgagtgcatccaggtgcttgagagcacgagggcaactaacgttgcggcaagatgcacttgaccataatcccctctttttttccggcgctttgcattttaaccgtgttccaaccccaacaggcggcggtagcagctctttttttgggaaaagtcccactttcatcacctgcaaccctagaaatgcatgctcatggaatctcgtcaaaagatatactaatgttaacgcctgcgttaacaattcttccttcttccccctgtccacgccctgccagcagccggattcgatactaaatgggcgcttatcattctcatcttcaaccttaagtaacaatga

SEQ ID NO: 52517 - DNA, 441 bp, Gossypium hirsutum
  Clone ID: LIB3197-054-Q1-M1-H6
cggacgcgtgggcaccaaaccaaaaatcgaacacgaaattcctctttttcgccagatctgggcacgtcgccggtcttagcaacctccgatccaatcatttcacctattcatttcaattcattaaacgtgtgacgcgacccactggatcgaagatgccggtggccgcttctgccatctacttcttgaatcttcgcggcgatgtcctcatcaatcgtctctaccgagacgatgtcgggggaaacatggtggatgccttccggatgcacattatgcaaacaaaagaactcggaacttggtccgtcagacagattggaggttgctctttcttttacatgagaatcagcaacgtatacatcgtaattgttgtcagcagtaatgctaatgtagcttgtgctttcaagtttgtcgttgaggctgttgctttgtttaaatcatattttg

SEQ ID NO: 52518 - DNA, 428 bp, Gossypium hirsutum
  unsure (1)..(428): unsure at all n locations; Clone ID: LIB3197-054-Q1-M1-H7
gtgggaaccccagagcattgaggaggttgaggactgcttgtgagagagcaaagaggactctttcatcgacagctcaaactaccatcgagatcgattcattgtacgagggtattgacttttacaccacgataactcgtgcaaggtttgaggagctcaacatggatctttttaggaagtgtatggagccagttgagaagtgtttgaggatgctaagatggataagagcagtgtccatgatgttgttcttgttggtggttccactcgtattcctaaagtgcagcagttgttgcaagacttcttcaacgggaaggagctctgcaagagcattaatcctgatgaggccgttgcttatggtgctgcggttcaggctgctatcttgagtggtgaaagaaatgagaaggtcangatctattgctttttgatgtcac

SEQ ID NO: 52519 - DNA, 277 bp, Gossypium hirsutum
  Clone ID: LIB3197-054-Q1-M1-H8
gtctaatttcattagaataagaaaggtacaagactaattccgacagtatacggagcactatttactacgtatgatgatttatagtaagagagtgaactttgatctattctaaaggttttaagaccagtattagttgcacatggaatggctagttcaaccttgtatgtattagtacgtgttggtcatcacattataattgttgaaagattctgggaggaatgagactatttttcattacatttttactaataaacgtccgatttgattgttctaaaat

SEQ ID NO: 52520 - DNA, 448 bp, Gossypium hirsutum
  Clone ID: LIB3197-054-Q1-M1-H9
aagaaattgagggcaaagggaatggaggcttcttctgtcactgaaaattcttccactggcaatgaccacgagcaagagcctgttttgaatcatggaggcacggagtcgaaccctgagactaatcgagaagaagaagaactagacggagaacaagttaggcgcgtattgcaagttagtgccgctactgggaaattttggcataattgggataagctgaagagcatgctatcctttcagttgaaactggttttatcagagtatcctgaggcaaaaatgacggttgagcaacaaaatgcttcactaggtgaaacttacctagagttggttacacggctaaatgaagagcttcattcttttattgagggcccaccatttacccttcaaagactctgtgagatcctactggatgcaagaagcatctatccaaaactcttgaagcttgccctag

SEQ ID NO: 52521 - DNA, 403 bp, Gossypium hirsutum
  Clone ID: LIB3197-055-Q1-M1-A1
gcacttgctcagatagctgccatggctgctgcctccaaagctagtactgctttgatgcagaatcctctatcatctggccaactgcttcccaatgctgtattgcctatttctcttcctggtgtacttggtgtctcaatgcctgggactgcagcagttgttcctggtagtgggctgtctggtcttccaaatgaagaggctgctcgaaaagctgcactgcaagctgctctcaatttacagcataacctagcaaagattcaagctgatgttatgcctgaacattatgaagctgagttggagatttatgaattcccacaaaatgctcgatggaatggtacccacaaggaaacttttggcccaatatcggaatggactggagctgcctttactacaaagggccagtttt

SEQ ID NO: 52522 - DNA, 391 bp, Gossypium hirsutum
  Clone ID: LIB3197-055-Q1-M1-A11
cccacgcgtccaaaaactcttctctatgtctatcctcttcctttttgccctcttctccatgcaaatccatgctagagagtacttcagcaaattcccaagagttaacatcaatgagaaagagacaacaaccagagagcaaaagcacgagaccttcgttccccagaccacccaaaagccagaagaacaagagccaaggttcattcctgaaacccaaaatggttatggcctttacggccacgagtcaggctcaagccggcccagtttcaccaccaaagaaacctatgaaccctatgtcacccctgttagattccaccctgatgagccctataacagcatccccgaatcctccaacaataaagacacttactactacaacaagaatgcctacgag

SEQ ID NO: 52523 - DNA, 424 bp, Gossypium hirsutum
  Clone ID: LIB3197-055-Q1-M1-A12
cggacgcgtggggcaacctatattttctcttcaaagacaccagcccaccgcaaggtacggtgaccggcgctcacaggcttcgaagcatggctcctttcagtcaccgacttccctctgaacttcgatttcgacgaagtgaaagggaatcgacggcctaaactcaaagtaagtgccatttttctttctttttttttttgaatgtaaatgatgaaaaatcggaggaaataaaaaatagagccgaaaatggagatcaccttcttaagaaattactttttttttttcaatctatgtgtattgcgtctgtattgctttctcttggtgtgcgtaaccttacaactgatgaaatcccttggctttacagccgaaggggtaaaatgatagaaaaataaatcaaaatacaatattctttgtggttttttttggg

SEQ ID NO: 52524 - DNA, 347 bp, Gossypium hirsutum
  Clone ID: LIB3197-055-Q1-M1-A2
cacagttttcggtatcagaaaccctgaggaaatcccatgggctgaggctggagctgagtatgttgttgagtctactggtgtttttactgacaaggacaaggctgctgctcacttgaagggtggcgcgaagaaggttatcatttctgctcccagtaaggatgctcccatgtttgttgtgggtgtcaatgagaaggaatataagcctgaccttaacattgtctccaatgctagctgcaccaccaactgtcttgctccattggctaaggtgatcaacgataaatttggcattgttgagggtcttatgaccactgttcattctattactgctacacaaaagacttgtgatg

SEQ ID NO: 52525 - DNA, 425 bp, Gossypium hirsutum
  Clone ID: LIB3197-055-Q1-M1-A4
cagaaaatgaaggtttccgtcaaaactctcaaaggcactcacttcgatatcgaagtcaaaccagaagatgcggttgcggatgtaaagaagaacatagaaactgttcaaggggcagatgtttatcctgctgcacaacaaatgcttatctataagggaaaagttcttaaagatgacacgacactggctgaaagcagtgtcactgaaaatagctttattgtgatcatgttgacaaagaataaggttgcatctggggagggttcaactgcttcagctgctcctacaatgaaagctcctgaggcaagtaggccaccaactgctccagctccagcttctactgcacctgttgcaatgtcagctacggctgcacttactgctgaatctgctcctgttgcttcaagtactcctctgtcagattctgatgttta

SEQ ID NO: 52526 - DNA, 440 bp, Gossypium hirsutum
  Clone ID: LIB3197-055-Q1-M1-A5
attgcaaatgtatgttttaaacacaccaaaacagattatgccaaatgagtagcctgtcaaaggctggagggcaggaggagggcctgggtttgggttccttcctcccggcctttgtacggtgccttgggcccctcagccccagcgccagggcctcccagctgaggccacaggacaagcacttatttatgatgtactaaaagaagccacagtatgtggcaactgcaaaaggatcaggaatttagggtgtgatctcagacacgtgtcctgggtgctgaggggaaaggaagcgggcacagtgattgtagacaatgagggggtttctcttgatgtaatgaaatgcaattttatggtttggtgcaaaaactcctattttccagtaaattaactttatttctaaagcatattttgatttaccatcaagagcaataaagcattaaatc

SEQ ID NO: 52527 - DNA, 414 bp, Gossypium hirsutum
  Clone ID: LIB3197-055-Q1-M1-A6
gagaaccttctggtggcagagatatacaaccaccgaattatacgttatcttgaagagctttctgattcgttatccttgattagagacgatgacacgctggttgcttatcgattaaataaagacattgagaaagctcctttagttgtgtttatgcatcagcagatggaggagcagtatatgcttgggaaactgacttcaagttggaaaacatttggaattcctcttgtagcaaggctttctaatgttgtcactgggtctgacatccatggtctatatctcaaattactaaattcatttcagacacaggctgaagatgtcttagaagacaatgatacctctgagagtactgcagttgaagccatttctctgaaagagcatgatgcatcattctcgacttcaaacggcattgaaaag

SEQ ID NO: 52528 - DNA, 373 bp, Gossypium hirsutum
  Clone ID: LIB3197-055-Q1-M1-A7
gaaaaataaaaactggttcagcgacagagttggcttcatttctcttacctctatcaaataccacccaaacatcgtcgtcttctacactcttctctggtaagttcatcgaaagatcaaatcaagatccctgccaaaatgaacgacgctgatgtatccaagcagatccagcagatggtgagattcatccgccaggaagcggaggaaaaggctaacgagatctctgtttccgctgaaaaggagttcaacatcgaaaagcttcaattggtggaagcggagaagaagaagattatgcaggagtacgagaaggaagagaagcaagtttgaaatccgaaagaaaattgagtattcgatgcagcttaatgcatctaggatc

SEQ ID NO: 52529 - DNA, 392 bp, Gossypium hirsutum
  Clone ID: LIB3197-055-Q1-M1-A9
aaaagatctggcatcatacattctacaatgaactccgtgttgctcctgaggagcaccctgtgcttctcacggaagcacctctcaaccccaaggccaatagagaaaagatgactcagatcatgtttgagaccttcaacgtacctgctatgtatgttgccatccaggccgtcctctctttgtatgccagtggtcgtacaacaggtattgggctggattccggtgatggtgtttctcacactgtgccaatctatgaaggatatgcccttccacatgccatccttcgtcttgaccttgcaggtcgtgatctaaccgatgccttgatgaagattcttaccgagagaggttacatgttcaccaccactgctgaacgggaaattgtccggacatgaaag

SEQ ID NO: 52530 - DNA, 423 bp, Gossypium hirsutum
  unsure (1)..(423): unsure at all n locations; Clone ID: LIB3197-055-Q1-M1-B10
cccacgcgtccgctctgctcccaaacccatccaacatttttgaggtttgttaggtcggaagtccctgattttctggtctaagtctaagattctaagtagttaagatttagttgtaatttatttttattgttattgttctgtcaatatgtggagttttgcttcaaataccattgctagcattgggttaaagagttcaaaagaggcgaatcaagcttgttccgagtgttcagatgacgagctgtgttcaaatggtagtagagatgaaggattagagtgtcccatttgttgggaacctttcaacattgttgagaatgtgccttatgtcttatggtgtggtcacactctttgccaaaattgcatcctgggtctccaacctgctgttttgaaactccccactcagcanatcaagatccccatgttcat

SEQ ID NO: 52531 - DNA, 419 bp, Gossypium hirsutum
  Clone ID: LIB3197-055-Q1-M1-B11
gtccagagagctgtttgcatgatttctaactccaccagtgttgctgaagtcttctctcgcattgaccataagtttgatcttatgtatgccaaacgtgccttcattcactggtatgttggtgagggtatggaagaaggagaattctcagaggctcgtgaggatcttgctgcattggagaaggattatgaagaagttggtgctgagtcggctgagggtgatgagggtgaagatgatgagtactaagaagtacctgtgattgagtgtgcgtatgatgtcttttattacctgttgcttccgtgttatgcaagcttctattctttgaagcttgttaaagacttgaaatggtttactgtatgttatgctttttcatggtttatttgtgtttggagtgaaacttgatatttttgtgtctgtattgg

SEQ ID NO: 52532 - DNA, 423 bp, Gossypium hirsutum
  Clone ID: LIB3197-055-Q1-M1-B12
ctcaaaatatggccaggagaagggttgttttggtgcagattttggcactagccttggccgctgttatgccattgctctcaggaggtgtggatattcaacaagttagggtgctggcagctaaattcaacgtgacttgcgtagtggtattcggagactccagcgtggatccaggcaataacaactatattgctacgccctttaagggtaatttcctaccgtatgggaaagacttcttcagaggccacccgactggacggttcagcaatggaaggctagccactgattttattgctgaagctttgggttacacgaacgaaattcgacctttccttaacaagagattgagaccagttgatatcttgcatggtgttagtttcgcatcagctgcttctggttatgatgagctcactgccaatctctcac

SEQ ID NO: 52533 - DNA, 419 bp, Gossypium hirsutum
  Clone ID: LIB3197-055-Q1-M1-B4
gttccgtagcatacggaccgtctccatccgccatggcaccaacaccggactgcatgacaaacttgtttaacttgtcggattgtttgccgtacgtgacggtcgaaagcaaccaaacgaagccggacaaaccttgttgcccggagttggccgggctcgtggaaagcagccctcagaggttatgtttattgtttgataagaacgcgacctcgagttatggagtcgacattgacatggatagagctcttaagctacctaatgtttgccatgtataaaacccctcccgttagactctgctccactatctatggtgccgcttcaatggggttccaacttcaggcactgaagtatatttatcaccaggatcagctccaagcgcttcaaatggaaacagcagtggtgcttcaaacatggcattattt

SEQ ID NO: 52534 - DNA, 429 bp, Gossypium hirsutum
  Clone ID: LIB3197-055-Q1-M1-B5
cccacgcgtccgatttgtctgtattttgaataaagcatcgcagatttttctcagattgagattccttagaatctcacccatccctttaacgccctggcctaatttccgtttctggttagggtttatatcacgatttatccgttccttttctcagaaagccggcccacctccttccttcacacctgcataatccaaatcctcagaaaaagaacaacaaatcgaagaaaatggtggtcaaaggcgaagaatctgacagaatcttagagctcttcttaaagattggtttagacgaacgaactgctcgcaacaccatcgctaacaacaaggtcactgctaatctcactgccgtcgttcacgaggctgctttggctaacggatgtgaccgtgcaattggaaatcttttatatacggttgccacgaagtaccctg

SEQ ID NO: 52535 - DNA, 426 bp, Gossypium hirsutum
  Clone ID: LIB3197-055-Q1-M1-B6
cccacgcgtccgctcttaaccaaccacaaacccatttaagttggtgttggtgacaccgagagttcaagatccaattaaagatgaaggtgatagagaagatccaatctttgcaagaagggaaagtggtgttttcctttgagttcttccctccaaagactgaggatggagtagacaacctattcgagagaatggatcgtatggttgctcataacccgtccttctgtgacattacatggggtgcaggtggttccactgctgatctcaccctcgacattgctaacaagatgcagaatatcatctgtgtggagacgatgatgcacctcacttgcaccaatatgcccgtagagaagattgaccatgctcttcagaccatcaagtccaacggtattcagaatgttctcgccctccgaggtgatccccctcacg

SEQ ID NO: 52536 - DNA, 418 bp, Gossypium hirsutum
  Clone ID: LIB3197-055-Q1-M1-C10
atcgatttttgcacaattgatcaactcttcttcgatctactcctcaaattccaccaaaaactcctgggtttattgaattttttttaatattttcttatataggttttttgtttttttttctctttcaatcgtgattcattgattgatttggcaattctgggatttacccatttcatattattgtgaaatattggtggggttttgattttctcctcgtgatcttcttgtttgcatttatttgctttgattatgaacgaatgttcaaatttatcatcttttttttttatagcttttttttcctttgctggattatactttccttgtgttgtctgtaatgaatttggcatattttcttattgattatgattattatttttaataataactattattttatggtgtatgctcataatctttt

SEQ ID NO: 52537 - DNA, 329 bp, Gossypium hirsutum
  Clone ID: LIB3197-055-Q1-M1-C11
tcgatcgggaaaggcatcttggtagaacatgccaccggtgaggtgatcggagaaaccgcggttgttggcaacaacgtgtcaattttgcatcacggtaccctcggagggactgggaaggcatgtggagatcggcatccgaagattggagaaggagtctaaatcggagccggtgcaaccatattagggaaagtgaagataggggaaggagcaaaaatcggggcagggtcagtaaggctgatcgatgtgccacctcagaccacggctggaagcaaccctgcaaggctcagcggagggaaggagaaaaccgcaaggcatgaggaatgccccgg

SEQ ID NO: 52538 - DNA, 423 bp, Gossypium hirsutum
  Clone ID: LIB3197-055-Q1-M1-C12
gtgactctcctcgcagttattcccaagtattcacagaaggattggctttcaagctacgaaacattgactacctatgtggtccctaggtcctccaagaagttgtatgaagataatgaatatgctctttacactgtcacgttatttggtcgcgtcgctgacaatttcagaactagtgcacgggaacgaggcttccaaattcgtgattttgaatatagtccagaagcacaagaaagtcgtaagcaggaactagagaaattggtacaagaccaagatagcttgcgaagctcacttttgcaatggtgttacactagttatggggaggttttcaactcctggatgcatttttgtgctttacgtatctttgcagagagcattctaagatatggtctgccgccgtctttcctggcatgcgttttgtcccca

SEQ ID NO: 52539 - DNA, 423 bp, Gossypium hirsutum
  Clone ID: LIB3197-055-Q1-M1-C4
cccacgcgtccgcatctttgtactagttcttgtaaagttcattcatttatgatattatcatcaaatttagaatctgggtttcttgtattttctcattttttttaggttgtttttaccttagtttgatcttagtaaagcattggtctttatctaggatctggttttttaaaaattcaatctttttttgtttgtcttacagaagagtagattttgatccttgggggggacttttgaaagagaagaggtaaacaatttagtccctgtgagattccatggctgatgcattggatttggtccttttttactttaacatcctcttagttctataaagccgccaacattatattttgttttccttggtcaaagcaacttggttcaggtctaggttagcttagaatttgggggtgtttttagggttggaac

SEQ ID NO: 52540 - DNA, 428 bp, Gossypium hirsutum
  Clone ID: LIB3197-055-Q1-M1-C5
caagcaaacagaaagagaaaaacatgagaagccaaaatctaatggcaacctttagaagatcaaagggtggaagacgatccaaggctattgaaggatgcaaaaaacacccaaaacacaagcaatcaccaggcgtttgttcactgtgtttacaacaaaaactctctcagctatcgtttgaatattccatcccacgatgtcgtatccccattacagttgactcttccatttgttcttcatcgtcaacatcatcttcatcttcttcattgtcatcttattattcttcagcttcaacttctgcttcttcttctcctacacataactaccatttggttagagaaggaaagggtaattcgtttcccttgttactgtttagtggcatgaaaaggaattgtgggttcttctcaaagttgcttcatcatcacagcaac

SEQ ID NO: 52541 - DNA, 419 bp, Gossypium hirsutum
  Clone ID: LIB3197-055-Q1-M1-C6
ccagtgttttactctctcgtcaacttcaatggaggctccgatcagagccagagaagccctaagtttcattctcttctctcttctattttcgatctgcagatcctcttccttaaaccatctcctgatctccaacgccgagcgtagaattgacttgagctcccacattgtcaaagtttacttgactttgaaggtcgagaatgctggtagtacgcctacttcagaggtgtttctttctttcccacccactcaagttgatcatctcgcaacggttgaagcattagtaactaaaggaaagaggaagaagactacgttagtccgtcttgatgtaaaaccaactgaactgcctgatgcacctaatgacgctaaatattttgcgatttatttggaaaatccattaaagtctggtgaaagcacaaccc

SEQ ID NO: 52542 - DNA, 421 bp, Gossypium hirsutum
  Clone ID: LIB3197-055-Q1-M1-D10
aaaaacagtagttttttttttctttactttgcttgctgtacatatacatatagtattaagtattgaaccctgagggaaagcgttgtcggcgcagggtcactttctgtcggcattgtctgtatccaacgaggggtattcgtttctaagttattcattcaatttttaaattcagaactgaatttgcattccaaagctgtctctgtgttgtgttttttttttctttctcatttggtttcgatgatttggaccttccatctcgtttattaaagaaaaaaaaccaactacaaccattccaccaacttcatcaactattgctcacctcgattcctcatcactgctgtctctttttgtctgccctcaccatcccttctttttttttcaccttgatttcacccattcgcactttatcttattctggata

SEQ ID NO: 52543 - DNA, 422 bp, Gossypium hirsutum
  Clone ID: LIB3197-055-Q1-M1-D12
gttgttgtcatggcttctctgccttgcatcttcttcttatctttctttataatctccacaacattgacgtcagccggcgccgccgccgccaccatcaaactctccctctctcccttccctcacccttcttcctcccatccttaccaaattctcaacaacttagtcacttcttctggggcaagagcccaccacctcaaacatcccaaagccaaggccgataatactacctcttctcttctcagggctcccctatgttctcacaggtatgggggctacactatctccctcaaatttggaactccggctcaaacccttcctttcggcatggacaccgggagcagcctctcctggttcccttgcacctctcggtacctttgttgccaatgcgcattccccaatggtgaccctgcaaaaatccccac

SEQ ID NO: 52544 - DNA, 408 bp, Gossypium hirsutum
  Clone ID: LIB3197-055-Q1-M1-D5
aagcgtccggttcgaccggctattgtgccaaagaaagctcgagccacaagcttacattctcaaattccatgctgtctagtttatggttgcaacaaggaccttagctctttgaacgatttccacaagaggcacaaagtttgtgaggctcactctaagactgccaaggtaatggtcattggaattgaacaagggttttgtaagcatcgcagcatgtttcatttactgcctgaatgtgttgagggtaagcgcagttgtcgtaaacgcctagcagggcataatgagcgcagaaggaagcttcatttcaataccttttctggaaaatcacatatggaggcctcattcatttcaaggtaccaaatttactggaacctccataccgaaacaaatgcctttgtgtatacctaacat

SEQ ID NO: 52545 - DNA, 393 bp, Gossypium hirsutum
  Clone ID: LIB3197-055-Q1-M1-D6
ctcgatttgccttcaggcggtcatttgactcatgggtattatacctccggtgggaagaagatttctgctacttctatttacttcgagagtttgccttacaaggtgaactccactacggggtacattgactacgataagttggaagagaaggcgttggatttcaggcctaagcttatcatttgcggtggaagtgcgtatcctagggactgggattacgctaggttcagggccgttgctgacaagtgtggtgctctgttgttgtgtgatatggctcacattagtggccttgttgctgctcaagaggcaaacaatccgtttgagttctgtgacattgtcacaaccaccacccacaagagcttgaggggtcctagggctggtatgattttctatcgc

SEQ ID NO: 52546 - DNA, 413 bp, Gossypium hirsutum
  Clone ID: LIB3197-055-Q1-M1-E10
aatatacaaaccttgttcttctattttagctgctcttcacattgagaagctagctttttggtgtgtttgcttagcttcaatccacattttctttgttgcgaagatggttgcacacaaattcaccgttgatttgaataaaccccttgtcttccaggttggtcaccttggagaaagttatcaggagtgggttcatcagcctattgtgagcaaggaaggtcctaggttctttgagagtgatttttgggagttcttgactcgcactgcctggtgggcaattccaaccatatggctgcctgttgtttgctggtgcatttcaatgtccgtacgtatggggcatacactttcccaaatcgctttaatggttgcttttggcatttttgtgtggacatttgtggaatatgttttacaccgat

SEQ ID NO: 52547 - DNA, 386 bp, Gossypium hirsutum
  Clone ID: LIB3197-055-Q1-M1-E11
tttttcatttttttcttctatgttattagttaaaagttgttaactttatcctcaaaatcttgaagtagctgaatattgagtgttgtttgaacttggaacttttgctctcaagctatttctttgggcgatttttggaatttggtcttggcattacttgacctttaatattttgtgatcttttgatttgggttttaactgcaaagtgaacttggtttctactattactttgggggcttcctgtttgatgccaattgttttgtttccaaagttttgatgctaagatgcagcctgatcagagaagaaagtcagctgcggatgtagattttttcactgaatatggtgagggaagcaggtatagaatagaggaagtaattggaaaaggaagc

SEQ ID NO: 52548 - DNA, 426 bp, Gossypium hirsutum
  Clone ID: LIB3197-055-Q1-M1-E4
caaggatccgacaatttttggactagagaagcaagcaccgaggccaccaacaccaaatacgggtttatgagggaagtcaacgggcaaaggctcccattttggtgcaaagggacaaaaggagacgagccccgggcgttggacatgccgacgaggcacgtgaggtgtgcggcgctagggggaaactagggtttccaggtctgccgaaattggcttgggttttgggccatcgggctatcaaaaattgggtttttcgggtttggttttaattgtaaaatgggttaaatgtgatttgggctatccgggcttttgtaaatggattttaataattttggacttgttaatttttgggttttattattactgttgggttttctaacgggccgggcaaatttgggcccgtacagtatttgattgctgctataatat

SEQ ID NO: 52549 - DNA, 423 bp, Gossypium hirsutum
  Clone ID: LIB3197-055-Q1-M1-E6
cgaaatctcagagagagagagagagagatgggtagtttgggtaacagtgcaaactccaaagcggtacatgaagctggcgaagatgattatgatcaccacaagcacctttctcctactcatcagcagctcgatgctggtgctctctttgttcttaaatccaaaggatcatggctgcactgtggttaccacttgaccacatcaattgttgcaccaccgcttctcagcctcccatttgcattcaccttcctcggatgggctgccggaattataagtttggtggtcggagctttggtcactttctattcttacaacttgctatctctagtccttgaacaccatgctcaattgggtcgccgacatcttcgtttcagagacatggctaatgacatcttggggccaagatggggtcggtactatgttggg

SEQ ID NO: 52550 - DNA, 420 bp, Gossypium hirsutum
  Clone ID: LIB3197-055-Q1-M1-F10
tctgattcttgttcacgtcaagcttggcattttctgtttttctcaatggcaatggatgcttcactgactatgtgcaaatcggtcacatcacctcctggcttattcttggggagaagtagagttattaggagttcccagtgtacctttatggtgggaagcaggatcaactttcctaggcagaaagctcagtcaacccaagttaaatgtaaatctagcaggtgtggagtagctcttggtgctaaatgccgtgctgagaaaattttggtggcaaatagaggagaaattgctgttcgtgttatccgaacagctcatgagatgggaataccatgtgttgctgtttactctacaattgataaggatgcacttcatgtgaagctggctgatgaatcagtttgcataagcgaagcaccaagcagtcaa

SEQ ID NO: 52551 - DNA, 418 bp, Gossypium hirsutum
  Clone ID: LIB3197-055-Q1-M1-F11
caccaagccaaagctgtttcatttcaacaagaatgtcgagcgaaagccagatatgggtgattccgttctttgggcaaggccatctcctcccatccatggaactgtgcaagcacatagcctctcgcaatttcaaagctactctcatcatttccttcaatctctcttcttctataccctcttccttccatgatcatcctctcattcaggttgcccaaataccctcttcatcgcctactccaccagagctcagttccggcccccatcatcatcactcagatttagctcaaggcattgccagtctgctggagaatacctcccaacctgcctgtgccgtaatagataatatgatggattggacagcagacattttcaagaagcttaagattccaacaattgcgtttttcacctcgggtgcgtg

SEQ ID NO: 52552 - DNA, 417 bp, Gossypium hirsutum
  Clone ID: LIB3197-055-Q1-M1-F12
gtggtacggattaccatatacctgttgttggaggaatcgtgaaagagccaccaatgcacgttgtgcatattgctgttgagatggcccctattgcaaaggttggaggccttggagatatcgttactagtctctcccgtgctgttcaagatctgaaccacaatgtgaatatcgtttttccgaaatatgactgcttgaaatttgaacatgtgacagactttcattaccaaagatgttattcttggggtggcactgaaattgaagtttggttcggtaaagtggaggggctttcagtttactttctcgatccataaaatggattcttctcgacagggtgtgtttatggttgcggaaatgatgcacagcggtttggtttcttttgccatgctgctctcgaatttctacatcaaagcggatttc

SEQ ID NO: 52553 - DNA, 425 bp, Gossypium hirsutum
  Clone ID: LIB3197-055-Q1-M1-F4
ctaggtttacttttcagggaatccaggctcgtcctacgtctttgaaaaactcttatataagacctttcctggattgggtgcaatgatcaccaagaaaatagcaacaccggaaagaagaaagatctagtttcaattaggagctagaatggcggacatgcaactagttagggccagcaagagagtagagccgcagtacgtggagatgatggtgcctttgtattcttacgggtgcgaaaggaaagtcaaaaagactttgtcccatctcaaaggtatacctaattattttcttagctaagacccttgtcacttaattcaatgttatccctatgttttctgctactccattcttagattattggcccaaagcccagtgatattgtcaaaggacttggaattgtaaatctattgagtgaatttgggccatt

SEQ ID NO: 52554 - DNA, 416 bp, Gossypium hirsutum
  Clone ID: LIB3197-055-Q1-M1-F6
gcgatttatagtggaaatatagctccgagagacttcttcgaagagaggtagaggagtttaggacgcgcgatggctggctcgtggagagcatgcggctctttggtggttctagctatagttttgttcggatgtctctttgcaatctcaattgcaaaggaggaagccacgaaattggggacagtcattggaattgatcttggtacaacttattcttgtgttggtgtttacaagaatggtcatgttgaaatcatagccaatgaccaaggtaaccgtattacaccatcttgggtggctttcactgacagtgagaggctgattggtgaggctgcaaagaaccaggcagctgttaacgcagagagaaccatctttgatgttaagagacttatcggaagaaagtttgatgataaggaggtcca

SEQ ID NO: 52555 - DNA, 418 bp, Gossypium hirsutum
  Clone ID: LIB3197-055-Q1-M1-G10
caatcattcggttctccctctcattgctgcctcttttatcttccttttagattcttgaattatcccccgatttttatacgattccatcccatcggcgatctctcctgtgtacattttcatctacccgacgattttttactgatctgaaaacctgtgcttcggagaaaactacgccgaggtacagcatagcgaaatcggcggctgtcggttagggaggaaggcaaaaagaatgtcggccgaacagaaagaacaagaacctaaccctaaccctaaccctaatggtaacggcaacggcaatgaaaatttgaacactgaaagtgaacatgaagaaagacaagaagacaggcatgaacatgaacaggaacaggaacaggaacaggaacgagagcagccggcacgtcagtcttcgacaagaact

SEQ ID NO: 52556 - DNA, 418 bp, Gossypium hirsutum
  Clone ID: LIB3197-055-Q1-M1-G11
ccacgcgtccgagctgcaataacaccagccttttcgactcaattcccgggtgttaacggactcggcatttcaatagctcgtttggatttagctgttggtggagtgatacctatgcatacacaccctagggcttctgaactcattcttgttatggatggcacactttttgctggtttcatatcctcagataacaaagtttactccaaatctctgaatgaaggagacattatgattttcccacaaggtttattacatttccaaatcaatacaggcaaaactcaatccgtggcatttgtatccttcaacagtgcagaccctggtgtccaaatcctggactttgccttgtttacaaatgacttgccgactgacattattgaaggataccactttctggatgctgctcagattaagaagctga

SEQ ID NO: 52557 - DNA, 410 bp, Gossypium hirsutum
  Clone ID: LIB3197-055-Q1-M1-G12
cccacgcgtccgaaaagacccaagcggttcctccgtttggtgatggttaatgcttttatccgcgttaccgatagggagaagaagaagaagcaaaagggaaggcaaaattcaaatcgagatttcagcttggacttaaccgtcgttttcccgtacatcgccattttcatgctatttttctcaaccggcgacggcattgaaggtttacggaaatggatcttattcgcggaagctagcggcggcggcggcggcggcggcggcggtggcttctggtcttattactctgtggtttcgccttctggcatagccatcgccgtcactgccatggccggaatccgctctcgctgctaccatcgtttattctcgaaggggtagcctgaaatcaccctgcgcccctagaaaagaaaaatgcc

SEQ ID NO: 52558 - DNA, 408 bp, Gossypium hirsutum
  Clone ID: LIB3197-055-Q1-M1-G2
ggaaggtaggaaggaaggaaggaaagaattaataaaataaaataaaagaaaatcgcagatcagacagagaaaaaccctaacctaaatctaaatgggtaagaagaagaaaagagttccgtcaaaggtatggtgttactattgcgacagggaattcgatgacgagaagatcctggtgcagcaccagaaagccaagcacttcaagtgccatgtctgccacaagaagctctccaccgccggtggtatggccatccacgttcttcaggttcacaaggagtccgtcaccaaggttcctaatgcaaaacctggcagagaatcgactgacattgaaatatacggaatgcaaggaatcccgcctgatgtgctggctgctcactatggagaagaagaagaagaagctccatcaaaagc

SEQ ID NO: 52559 - DNA, 290 bp, Gossypium hirsutum
  Clone ID: LIB3197-055-Q1-M1-G3
ccttgggcttcattttcaaaagggtggttgcaaaaatggtatctacagttcagagcataggctttggaatctatttatgttacagtgttttcttatttggccttggttccggttatgcttgacccaaacgacctgaacttgatccgatttcattaattccaaggccacccacggggggggtttcacaagaatcaggctatatgaacaggaaggaaatacatgggccagctgtactttactgggtcactgaagctactaacaggtctgagaagaaacctcttgttttttgg

SEQ ID NO: 52560 - DNA, 422 bp, Gossypium hirsutum
  Clone ID: LIB3197-055-Q1-M1-G4
cttttcaacctttacttctgtgtgaggagaaaaaggaaaaacctttccacaaatctgtatctgcgtctgctttgaaactaaaaaatggaaatcaataaccaccatgaaggaggtttcgaaatggagaagaagcccaagacgaagatcgtatgcactctgggtcctgcatccaggtccgttcctatgctcgagaagctgttgagggccggcatgaacgtcgctcgtttcaacttctctcatggatctcatgcctaccatcaggaaacccttgacaatctcagggcagctatgctcaacaccggcattctctgcgccgtcatgctcgataccaagggtcccgagatccgaactggttttctcaaggatggaaaaattcagcttaaacagggtcaagaaatcaccataacaactgactatagcat

SEQ ID NO: 52561 - DNA, 424 bp, Gossypium hirsutum
  Clone ID: LIB3197-055-Q1-M1-G5
catcaggggactcaatgtgtatggaggtacaaaagaatcagaagcctcaaatttgtgaaacctgcgaacagtgtgactacgagattgaatatgctgatcgtagctcctccctgggggttcttgcaaaagataagcttcacttggtgactgcaaatggatcaattaccaacttagatgttgttttcgggtgcgcatatgatcaacaaggcatacttttgaacacactatcaaagacagatggaattcttggactaagcaaggctaaagttagcttgccttctcaattggcaagcaaagggattattaacaatgtggttggtcattgccttgcaacagatgtcgcttccggcggatatatgttcttaggtgatgattttgtaccaaaccggggcatgtcatgggttcctatgcttggaagcccttc

SEQ ID NO: 52562 - DNA, 196 bp, Gossypium hirsutum
  Clone ID: LIB3197-055-Q1-M1-G6
tatctaatgattcaatgttgtttgaggagcaagtagagtcaaatgcctcataactcggtattccaccgtcagttgtcaccacaagaacgaatgtgatcttcgtcactacaacttcgcaatgtatagtataacataccttttaaattctgcccatgcttttttcacaaaacatgccaaaagttacccatgaaatgaa

SEQ ID NO: 52563 - DNA, 413 bp, Gossypium hirsutum
  Clone ID: LIB3197-055-Q1-M1-G8
accacttcttcccttccattttactttgttttagttgccataacgtcaccttccaatacaacccacaatgaggcaacaatatgtcttcactactctcacgttgctcatcctgtttttcctcagttgttcaacaacattagcccaagctccggcactggctccagcaccttctggtccgacaaacgtcaccaagatcctcgaaaaagccggtcaattcaccttcttcattcgtcttctaaagtccactcaagtggccaaccatctgctcggtcagctcaacaattccaacaatggtatgaccgtttttgcaccaacggacaatgctttttccagccttaaatcggtcacattgaatttactcaccgatgaacaaaaaggggagctggtgcaatttcacatcgtgccaacatacc

SEQ ID NO: 52564 - DNA, 400 bp, Gossypium hirsutum
  Clone ID: LIB3197-055-Q1-M1-G9
cttccttcgccgtctactgcacttgtgacatcgatttcaagtgaatcagaatgggtaaggaaaagagtcacattaacattgtggtcattggccacgtcgattccggaaaatcgaccaccactggccacctgatctacaagcttggtggtattgacaagcgtgtgattgaaaggtttgagaaagaagctgcggagatgaacaagaggtcattcaagtatgcttgggtgcttgacaagctcaaggctgaacgtgagcgtggtatcaccattgatattgccttgtggaaatttgagacgaccaaatactactgcactgtgattgatgcgcctggacaccgtgactttatcaagaacatgattactggtacctcgcaagctgattgtgctggtttgattattga

SEQ ID NO: 52565 - DNA, 412 bp, Gossypium hirsutum
  Clone ID: LIB3197-055-Q1-M1-H1
taatttttcacttcactcccacactgcttcaacaatggcgacgcccacatttcgccggctagaccttacccttttaaccctttctttactcgccgtcgccgtcaatgctcacaacatcaccgccatactcgaaggtttccctgattactccgtttacaacgatttcctcactaaaaccaagctcgccgatgagatcaatactcgacaaaccatcacttgccttgttcttaataatggagctatgtctgctctcactgctaaacacccactttccgtcgttaaaaacatccttagccttcatgttcttttagattattatgacccacaaaaactccataaaatttccgatggtactacacttactactactctttaccaaaccaccggaaatgcctccgggaaattggggttc

SEQ ID NO: 52566 - DNA, 389 bp, Gossypium hirsutum
  Clone ID: LIB3197-055-Q1-M1-H10
cggacgcgtgggttatcttagaaggtgtcttaataaacgccttctttcttcttcttctccctttctttgctttttcgaatttttcttaagcgagaatgagagagtgcatttcgattcacatcggtcaggccggtatccaggtcggaaacgcctgctgggagctttactgcctcgagcatggaatccagcctgatggtcagatgccaagtgacaaaactgtcggaggaggtgatgatgcttttaacacctttttcagtgaaactggtgctgggaagcacgtccctcgtgccgtctttgtggatcttgaacccactgttattgatgaagtgagaactggtgcttaccgccagctcttccacccagaacaactcatcagcggcaaggaagac

SEQ ID NO: 52567 - DNA, 411 bp, Gossypium hirsutum
  Clone ID: LIB3197-055-Q1-M1-H2
cggacgcgtgggcaagtatagcctttttcttttgcctttttgtcatttcccttaattaattgtctcttatggagtcgttctcttttttgttgataatttcaattttctatcttctcttcaaaatatggaattggatcaataacgtgagagaccaacaatgttacattttggattaccaatgctacaagcccagtgatgataggatggtggggactgagttctgcggggaagtgataaagaggaacaagaatctcggactcaacgagtacaagttcttgctgaaagccattgtcagttcaagcatcggagaacaaacctacgccccgaggatcatgttttccgggagagaagagagcccgaaactggaagattggatcttgggaaatggaagagtttttcacgatagcatcg

SEQ ID NO: 52568 - DNA, 416 bp, Gossypium hirsutum
  Clone ID: LIB3197-055-Q1-M1-H3
cgatcaaccaaccaaaaaagataaacaagatggtttcagggtcagggatctgcgccaagagagtggttgtggatgcaaggcatcacatgctaggaaggttggcttccattttggccaaagagttgttgaatggccaaaaagtagtggttgttcgatgcgaagagatttgtatgtcgggtggtttagtgaggcagaagatgaagtacatgaggttcttgaggaagcggatgaacactaagccttctcatggccccatccattttcgtgctcctgctaagatcctctggcgtaccattcgtggcatgattccccacaagaccaagcgtggggcagctgctcttgctcgattgaaggcttatgaggggattccagctccatatgataagacaaagaggatggttattcctgatgctctc

SEQ ID NO: 52569 - DNA, 422 bp, Gossypium hirsutum
  Clone ID: LIB3197-055-Q1-M1-H4
atttgatcaaatttctgcgaaaaataaagctatatatataaaaagcagctattgaaagaagtggagctgatgggttcgtctttcggtgaagcttttccagcaatgcaggaaactttgctggagtttcgtgctggtaaaatgatgttggaaggaaaaagggttgtccctgatacacgtaaagggctcattcgcatagctaggggtgaggagggactggttcattttcagtggcttgatcggactcaaaatgttattgaagatgatcagattattttccccgatgaggctgtttttgagaaggttaatcaagcatcaggcagggtttacatattaaagttcaataccgacgaccggaagttctttttctggatgcaggagccgaaagctgaagatgactcacaattatgttgcgcggtcaataa

SEQ ID NO: 52570 - DNA, 391 bp, Gossypium hirsutum
  Clone ID: LIB3197-055-Q1-M1-H5
ctttgctgttgaagtagtaatatctatagcatacagagatggagaggcaaagaagcaagcaggtttgtttgttgatgtgggttttggttgctgcctttttctcccacaatagggtcattgcagtgacctccactggccttggtgagcagaaaaactactatccagctcctgaccctcatgctggaactcccccttcaggttcacatggcacaccaccatcttcaggaggtggatcacctccctctcatggaaccccgtcacatggaggtggttaccacccttcaccaacaccatcaacgccttcgggtggaaattgtggaactcccccacatgacccttcaactccatcaacaccatcacacactcctcctcatggtactccaccatcatc

SEQ ID NO: 52571 - DNA, 367 bp, Gossypium hirsutum
  Clone ID: LIB3197-055-Q1-M1-H6
gagaagtaaacagaaaagggaagaattttggtgaccggtgattcgtgagtattgtaaacagcagcagcagcaatggagctgttctacttcgtggtgttcggggcattgggagcggtggtggcagcattagagctaagcaagaacagcaaagatcgaatcaacacatcctctgctttcaattccttcaagaacaattatcttgtcgtttattctctcatgatggctggagactggctgcagggtccgtatgtttactatctttacagtacatatgggttcggaaaaggtgaaattggacaactttttattgccggttttgggtcctctatgttgttcgggacaattgtcggatctttagcagacaaac

SEQ ID NO: 52572 - DNA, 420 bp, Gossypium hirsutum
  Clone ID: LIB3197-055-Q1-M1-H7
aatgactacactcactgggaaatgtatgctattggtggaagtgcaaaccccaccatcaacagccagggtaacagatatgcagctccaacaaacccatttgcaaaggaggttaccaagagagtagatacagctgaagggcagtggaagagctggaattggaggtccgaaggagacttgttactgaacggtgcctacttcacaccatctggagctggagcctcagccagctatgccagggccttaagcttgggagccaagtcctcttccatggttggagccatgacttccaatgctggtgctcttccttgccgcagaggcaagcaatgctagtattatccatcttttccccaatcaattaaattggctgaaaatcagcctttttacaatctggttgattttccccctctttccatgattctt

SEQ ID NO: 52573 - DNA, 380 bp, Gossypium hirsutum
  Clone ID: LIB3197-055-Q1-M1-H8
taaaccctaagaacactgtcggcggcaatggcaacttacgatctaaccccgcgtatcggcccgaacctagacaggcacttagtgtttccattgctggagttcttgcaagagcgacaactatacccagatgaacagatcttgaaagcaaagatcgagcttttgaacaagacaaatatggtcgattacgctatggatatccataagagcctttaccgcaccgatgatgtccctcaggacatggtcgataggagagtcgaggttgtcgctcgtctcaaagctttggaagatgccgccgctcctcttgtcactttcttgcaaaaccctaacgctgttcaggaactgcgtgctgataaacagtataatctccagatgcttaatga

SEQ ID NO: 52574 - DNA, 365 bp, Gossypium hirsutum
  Clone ID: LIB3197-055-Q1-M1-H9
caaaaatggatggttattagtagaagagggatcatgttgtttgtggtggcattttccgcaataatcagcaggagttgtcgacaattaaccactctttttggtgcaagcattaaccaccttgactgactctgagatatatgcgggcattaatgactatcctccctacctttttgaaggctatcctttcttatggacgggactttgcctacaaaaaacctactgggaggtgttgctatggaaaattaaccactgacatcactgctgaaactctgggggttacaactaatacaccaccttaccttatcccagaagcattatggaagaaccttctgcttggagccaatattgcttcatctggctctggc

SEQ ID NO: 52575 - DNA, 277 bp, Gossypium hirsutum
  Clone ID: LIB3197-056-Q1-M1-A1
gttaaagattcaaaccccaagcttgtcgtcaccgtccctgaattgtttgacaaagtcaaggatttcaaccttcccgtcatcttgcttggtcctaaacgaaaccgacaaccgttcgacgttaaaaatgtcccaaagatcctgtcttttcacgatcttctcgatttagctggtgatgtaaaagagtttcctcgtgtttctgtcaaacaaaccgatacggcagctcttttgtactcttcaagcacgacggggatcagtaaaggtgtcgttttgacacatg

SEQ ID NO: 52576 - DNA, 378 bp, Gossypium hirsutum
  Clone ID: LIB3197-056-Q1-M1-A10
aaggatgcagatgtcatattgacaacttggactggtgcattttctcgcaaactggacaacactacatttgatttgattattatcgatgaagctgcacaggctcttgaaatagcatgctggatggctctactaaagggctcaagatgtatacttgcaggggaccatctgcagcttcctccaactatccagagtgttgaagctgagaggaaagggttaggaagaaccctttttgaacgccttgcagatctgtatggagatgaggtcatgtccatgctcactgtccagtaccgcatgcatgagcttattatgaactggtcatctaaagagctttacagcagcaagatcaaagcgcattctagtgttgctacgcacatgctt

SEQ ID NO: 52577 - DNA, 416 bp, Gossypium hirsutum
  Clone ID: LIB3197-056-Q1-M1-A11
cacaaacaaaacattttcagtcctccaccaacccactctaaacactcttttgtttttttcccttggaacagctgagccaagacgcgagtaatggcggtggcaatgagctttcgtagattgtcttgctccatcaagtccccaaccagacctctcttcagtggcagctccctctattatatgtcaacagctgcggcagagaaagagaaagctcgtgctaatcggatacatcagttgaatgctccgctagaggaaatcgatcctgaaattgctaccataatcgaactcgagaaagctaggcaatggaagggactagaacttataccatcagagaattttacatccctatcagtcatgcaagcagtgggctctgtcatgatcaacaagtacaagtgatggtatcctggtgctagatacta

SEQ ID NO: 52578 - DNA, 403 bp, Gossypium hirsutum
  Clone ID: LIB3197-056-Q1-M1-A12
ccagatcaatgagcccaagagaccctctgacaagcccctccgtctcccacttcaggatgtctacaagatcggtggtattggaactgtcccggtgggtcgtgttgaaaccggtacccttaagcctggaatggttgttacattcggaccttctggattgaccactgaagttaagtctgttgagatgcatcatgaagctcttcaagaggctcttcctggtgacaatgttgggttcaatgtgaagaatgttgctgtcaaggatctcaagcgtggatatgttgcctccaactccaaggatgatcctgccaaggaggcagccaacttcacctcccaagttatcattatgaaccatccaggacagataggaaatggttatgcacctgtcctcgattgccacacctcccac

SEQ ID NO: 52579 - DNA, 294 bp, Gossypium hirsutum
  Clone ID: LIB3197-056-Q1-M1-A2
agcaggttaaggctgaacatcaggtatcttcggggttgcttcagccaatcactataccggaatggaaatgggaaagaatcactatggattttgtatctgggttaccgttatctccgaggaagaaagatgccatttgggtaattgtcgaccgattgacaaagtccgcgcactttatcccagtatgtatggattattctttagataaattggctggattgtatatatctgagattgttagactacatggagtgcctgtctgcattatatcagacagagatccccgatttacgtctc

SEQ ID NO: 52580 - DNA, 292 bp, Gossypium hirsutum
  Clone ID: LIB3197-056-Q1-M1-A3
ctccgtctaaggttttgccaacattttctactgtattgtcacttacaggtctgccacaacttagtggagtgcctggcttaaagtttgataaacgtcttctgttgcatggacaacaatacatagaaatacacaagccacttacttcaaatgcctctctacttaacaagacataccatcgcaggtttccatgacataggtaaagcagcaatacttgaacttgtaaccagaagatatgagaaagagactggggaactattaaccttgaatcggtaaggttgtattttcccccact

SEQ ID NO: 52581 - DNA, 417 bp, Gossypium hirsutum
  Clone ID: LIB3197-056-Q1-M1-A4
ggtcaatctaaaatatggcagacgaagacattcagcctcttgttgttgataatggtactggaatggttaaggctgggtttgctggagatgatgctcctagggctgtcttccctagtattgttggacggcctagacacacaggtgtcatggtggggatgggacagaaagatgcctatgtgggggatgaggctcagtctaaaagaggtattctcacattgaaataccctattgaacatggtattgttagcaactgggatgacatggaaaagatctggcatcacactttctacaatgaacttcgtgttgctcctgaagaacaccctgtgcttcttactgaagcacctctcaatcctaaggccaacagggagaaaatgacgcagataatgtttgaaacgtttaatgttcctgccatgtatg

SEQ ID NO: 52582 - DNA, 420 bp, Gossypium hirsutum
  Clone ID: LIB3197-056-Q1-M1-A5
ggagcagtaaaaatatcccctcaccaccgctactattattataccattactctactacagctgctatcattactacatacatgtccacccaaagtcgagcagttggcggcaccgagcacaactggtgccgagcggtggtcgggggaaccgggatagccgtcttggctatcatttcttccaaaaaccccgacgtttcacatcttaaaaatgccctccacaagctccaaatctcccatcccattcttaggtctcgcctccattacagtcctactgccaacagttactccttcgttacctccccctcccctttcattcaaatcaagtactttaaccattctacaacttgtcaaatccttgaaaacaaccaaaacatctcaccccttcatttgattctcgaacacgagcttaaccaaaacgctt

SEQ ID NO: 52583 - DNA, 425 bp, Gossypium hirsutum
  Clone ID: LIB3197-056-Q1-M1-A6
cttgcaactcctgcttgagtttgcagatgcccggttgcgttggaaaaaaacaactgtaagatttcatctttttgagaaaaaaatatgggatcctgaacttcaagtgtttttcatttcgattgcatggtttatatactgatgcttctaatttgggttacttagctttactttgtcgttcatttctgaattctgattagaagttggctagttctttatggtaatcagtgtacatttcggaaaagatagctgagatgttgggtaattttgaggttgaacagtgttcatttagcaagttgagacaatttcatgaaagggttttgagttttagtgacagatttgtaaagattcactgtaagcattgtgtttctgaatcaatcagtgcacttattgttattggtttatttttatcgttccttttagcaatg

SEQ ID NO: 52584 - DNA, 300 bp, Gossypium hirsutum
  Clone ID: LIB3197-056-Q1-M1-A7
gaaatctcttctatttttccccactctactgcaaaaatgtttcgatccgatgctagatcggccgccggtaagagcctccttcgacgaggatatgcaaccgccgtacctgaacggaaagtcgctgtcttgggcgcagcttgagggatcggccaacccttggctcttctcatgaagcttaaccctcttggttctcaactggctctctatgatatcgctaacactcccggtgttgccgctgatgtcagccacatcaactctagatctgaggttgccggatatgtaggtgaagagcagttgggg

SEQ ID NO: 52585 - DNA, 268 bp, Gossypium hirsutum
  Clone ID: LIB3197-056-Q1-M1-A8
gcttccccacctttttatccatcggggtcttgcaacaaagacactgctttaactcagaagaaagatgtgcatgctgaaagtgtgagcaggaatctttgcccttctgttacggatgagaatttttctgcttcacaatctagttcattacgagggaagaacgtgcttgattctctcagcatggcaaagctttatattgatgatcccagcatgtcagcttctgcgaagcctttgaccaatgtgcagatggtacctttctggatcttcattg

SEQ ID NO: 52586 - DNA, 391 bp, Gossypium hirsutum
  Clone ID: LIB3197-056-Q1-M1-A9
gtttgagctagctagctcttactcaaatggcaaccaaaacgatgatgttgcaaatattttcacttttcttctttttgttcagtatctgcaactccattttccttggtgctaatggagatgacaatggtggttggcaaactgcccatgccaccttctacggtggtgctgatgctaccggcacaatggggggagcttgtggttatggaaacctgtacagtcaagggtatggaacgagcacagcagctttgagcactgcacttttcaacaatggcttgagctgcggtgcctgctacgagctccggtgcaacaatgatcctcaatggtgcattagtcgaaccataaccgtgacaagcaccaacttttgtcccctaactatgctttatctagtgac

SEQ ID NO: 52587 - DNA, 269 bp, Gossypium hirsutum
  unsure (1)..(269): unsure at all n locations; Clone ID: LIB3197-056-Q1-M1-B1
gggacacagtgattcctatactcaagacaagaacatgcaagtcactattgcctttaatcactttggtgaaggccttgtccaaagaatgccacgatgtagacatgggtatttccacgtggtgaacaatgactatactcattgggaaatgtatgccattggaggaagtgctaacccaacaataaacagccaagggaatagatttactgcacctgacaacagattcagcaaagaggtgaccaagcatgnaggatgcaccgagagtgaatgga

SEQ ID NO: 52588 - DNA, 425 bp, Gossypium hirsutum
  Clone ID: LIB3197-056-Q1-M1-B10
gccaattgtttgagctagctagctcttactcaaatggcaaccaaaacgatgatgttgcaaatatttccacttttcttctttttgttcagtgtctgcaactccattttccttggtgctaatggagatgacaatggtggttggcaaactgcccatgccaccttctacggtggtgctgatgctaccggcacaatggggggagcttgtggttatggaaacctgtacagtcaagggtatggaacgagcacagcagctttgagcactgcacttttcaacaatggcttgagctgcggtgcctgctacgagctccggtgcaacaatgatcctcaatggtgcattagtcgaaccataaccgggacagccaccaacttttgtccacctaactatgctttatctagtgacaatggcgggtggtgcaatcccccacg

SEQ ID NO: 52589 - DNA, 321 bp, Gossypium hirsutum
  Clone ID: LIB3197-056-Q1-M1-B11
ggcttttggaatcagatcatggattgtatggtgatcccagaacaaaaccatttgtggaattgtatgcaagggatcaaaacaagttctttcaagatttcgctaaagctatgcagaagctaagtgtttatgggatcaaaactgggagaagaggagagattagacacaggtgtgatgctgtaaactgagagcttttttttactttgttaattttggtttgttcttttgagatatatttattatacccttgtctttatttgtatcaattgtcacatcaggcttaaaatttatacatatttacatattctgtgttctgggtttcaa

SEQ ID NO: 52590 - DNA, 343 bp, Gossypium hirsutum
  Clone ID: LIB3197-056-Q1-M1-B12
cggacgcgtgggggagagcatggccaactgatccatcagaaagatataattgtagttggagaatctgggctatttactccagatcatgttgggtatgtgcaagaagctggtgttaaagcagttttggttggggaatcgatagtgaagcaaagcgaccctggaaaaggaataaccggactttttggtaaagacatttctttgtgagttgtaacaataagtcggatcgagtatgggtgtgcttcttgtatcagttacttttcggtattggaacagttgtattatatgaaaaacaatgctcaacatgagttattactaaattaatgacataaatttcatgtatcct

SEQ ID NO: 52591 - DNA, 374 bp, Gossypium hirsutum
  Clone ID: LIB3197-056-Q1-M1-B2
cctttatacgcacatctaaggtgatatccgatttataaggagagctttcatcaataataaatctgctttcaacacaagcaacattaattcatggtttggctgagggggttcatatagattcattgtctcccatagtttctgaaggtcctaatgctaatagtttgttaaatattgaagatatagaaccctcagatctcgagaaatggtcagcagaattccctgatcacctggatgttttgttagctgagaagagagtagatgaagctctagcagcccttgatgaaagagagcaggcacctgctgaagcaaaggaaacaaattcattgagtcctgcagcacttacatatttacagactgctatcgtagagcggaag

SEQ ID NO: 52592 - DNA, 424 bp, Gossypium hirsutum
  Clone ID: LIB3197-056-Q1-M1-B3
ggtttcgttcggttcggtgatgaaaatgaaaggtcgagggccatgactgaaatgaatggagtgtattgctcaagtagaccaatgagaattagtgttgccactcccaagaaagcatttggatatcagcaacagtattattcgcaaggtagacaagcatcgaatggtgctgtggaacaaggtcttcgttctcataatgactcaaacaatgctaccatttttgttggaggacttgactcggatgttagcgatgatgatcttagacaacccttttcccagtttggtgagatcatctctgtgaaaataccacctggaaaaggatgtggatttgtgctatttgcaaacaggaaggacgctgaggaagcaatccagagcttgaacggaacaaccataggcaagcagactgtccgactttcttggggtcgaa

SEQ ID NO: 52593 - DNA, 246 bp, Gossypium hirsutum
  Clone ID: LIB3197-056-Q1-M1-B4
cccacgcgtccgttgacgcatgaacgtacgcgggggacggccatgattgatatgaatggagtgtatcgctaagcctgtccacataaatttaaaacgtacacttggcggacggcatatgcatatcagcggccatattatatgcaaggtctacactaattgagtggtgcgctggcacaaggatatacctctcataatgactcttacgatgctcccatttttactggctgacgtgacatatgtgcaaga

SEQ ID NO: 52594 - DNA, 373 bp, Gossypium hirsutum
  Clone ID: LIB3197-056-Q1-M1-B5
cccacgcgtccggaagaatgaagatgagcaaccaaaagatgacaagtgaagatgtgctgaagaagggccagagactttaaattatggtatcaatcctaatctaccttcctattgctataatggttgatgtgtttgtcgatttttaactcggtaaagagttatgttacttcacacacacacctacacacaaaacaggcacttgaaatagacgagtttgttaaaacctttgcagtggactcggttgaacattttcctttttttttttttctggtctaaagcactcgaaagatcgagtgtaggattaatatgttgacattcatgtctctattttcatttcattcaaagcggggaaaagaaaacggatgtgttggtg

SEQ ID NO: 52595 - DNA, 427 bp, Gossypium hirsutum
  Clone ID: LIB3197-056-Q1-M1-B6
agcagtagctgcagcagcatctattggttacattggtgtaggaactgttgagttcctattggatgaaagaggttccttctacttcatggaaatgaacactagaatccaggtggagcatcctgtaactgaaatgatttcctctgttgacttgattgaagaacaaattcgtgtagctatgggggaaaaactgcgctacaaacaggaagatattgtgctcagagggcattccattgaatgtcgtatcaatgcagaagatgcatttaaagggttcagacccggaccagggagaataacatcgtacttgccatctggaggcccatttgttcgaatggatagccatgtttattctgattatgtagttcctccaagctatgattcattacttggaaagcttattgtatgggctccaacaagggaaaaagcaatt

SEQ ID NO: 52596 - DNA, 293 bp, Gossypium hirsutum
  Clone ID: LIB3197-056-Q1-M1-B7
ctttctccatttctctctgaaaaaggtttgagagtggccataaggggttcaatggctcacagtcgtagccccgtcatggctccgccgtgaaccgcgattgagggtgcacggatccggctcccttctaggacctttccaaaccttttcccctttaaaaatctaaaaagaaaactagatctaggggatgtaaaacagttttaagagaaaaagatgtaaatcatggaagaagcgccttcgttttcgtggcttctctgaccctcgtcagaacccgaacagggttcatgacgtttggg

SEQ ID NO: 52597 - DNA, 196 bp, Gossypium hirsutum
  Clone ID: LIB3197-056-Q1-M1-B8
ctctctcgattgctggctggattaaggaagtcagcagtcgtaaaggaagtaaagcttcacactcttgcccaatatactgaatgctttagaaccgctgaatgaagcgaactttatccacgtgcatgttaatatctcttcaaaagaatacattgtttaaggactcttgagagaaaaccgaatataagggatgtccacc

SEQ ID NO: 52598 - DNA, 436 bp, Gossypium hirsutum
  Clone ID: LIB3197-056-Q1-M1-B9
cccacgcgtccggtgctgtgagtgaattggagagagatgagaagggggaaaattgccccagatgcaatgaagcgagcaagaggagcgagaaaggagactcgaaatccctcaatgcctatttcaagcagaggaagtcacgaacagaagacttcaaatgccgggatcttgaaggagaaaatcaggaacaaataagagaatcgggaaatgaaaataagggcaagccgggaaaagggttcttcgcttgctatctgctaacctctctcagccatcgtcataaaggccacacctatatcgggtctggttaacttattccagcgactgcagcagagtatcttctcactctagaaggtgagcttgtgcctgcgctcaccatcaaagactctgccgcttctcccttgccttacaagtgtttactcacgtgctttctcagctcttc

SEQ ID NO: 52599 - DNA, 420 bp, Gossypium hirsutum
  Clone ID: LIB3197-056-Q1-M1-C1
aacgatgttcggagctcaagcttccacttctgccttcggcactccttcttccacccctgcctttggcactccttcttccacccctgcctttggcactccttcttccaccccggcctttggaactcctccttcaactccggcttttggggctacttcttccacaccggcatttggcactccgtcttcgacaccggcgtttggcactccatcttcgacaccggcgtttggcactccgtcttcgacaccttcgtttggggctccgtcttcgacaccggcatttggaactccgtcctcgacaccggcttttggaactccatcaacgccgtctttcgctacgggctttggcggctcctctcttttctccaccccattctcttctcaaacgcaacagcaacagacttcattgtttcagcaaccaca

SEQ ID NO: 52600 - DNA, 425 bp, Gossypium hirsutum
  Clone ID: LIB3197-056-Q1-M1-C10
gtggtgacaccccgtacagcatcatgtttggacctgatatctgtggctacagcaccaagaaagtacatgccattcttacgtacaatgggacaaatcacttgatcaaaaaggaagttccttgtgagactgatcaactcactcatgtttatacattcattctccgtccagatgctacctacagcatccttatcgataatgttgagaaacaaactggtagcttatacactgattgggatattctcccaccacagaagatcaaggatcctgaggccaagaagcctgaagattgggatgacaaggaatacatccctgctcctgaagacaaaaagccagagggttatgatgacattccaaaagagattcctgatcctgatgctaagaagcctgaagattgggatgatgaagaagatggtgaatggacaccc

SEQ ID NO: 52601 - DNA, 339 bp, Gossypium hirsutum
  Clone ID: LIB3197-056-Q1-M1-C11
aagtgatccacgatgctattaccaagctagaggaggctttgtcgattaaccctaccaagcatgatgcttcatggcgtacgggaaatgctcaaacttattttgcctttttgactagcacggaagatgaggccaggccttacttcgaaaaggcagctcaatatttccagcaagcagctgatgaggatcccagcaatgaaatttacctgaaatctttggaaatatctgctaaggctccagagctacaccacgaaataattaagcaaggtttaggtcaacagatgcttggtgctggaccctctagttctacttctacctccagctcaacaagactgctacaaa

SEQ ID NO: 52602 - DNA, 368 bp, Gossypium hirsutum
  Clone ID: LIB3197-056-Q1-M1-C12
cggacgcgtgggtttccttttgtgccccaaaatttctaaagttgaaaacaaaagcaagcaattatgaaatcaacacaaatgaatggttcatatccaaatgagtcaaaggccggtcagactgtagttatcggttcaagtgggttcataggtcggttcattaccgaggcctgtctagactcaagccggccaacgtatatcttaatccgctctagttcaaactcttccttcaaagctttcaccattaagtttcttcaagacaaaggagccatcggtatatatggttctatcaccgaccaagaattcatggagaaagttctgagagaatataagatagaagttgttatatctgctgtaagaggggagagcat

SEQ ID NO: 52603 - DNA, 417 bp, Gossypium hirsutum
  Clone ID: LIB3197-056-Q1-M1-C2
atcaaacaagcccaagcttcccaatcaaatcatcaaccatttcctttcttcaaatcccaacaatgctttctcaatggggttcggatcctcagcttgctttgcttatgctcccacagagaatcgcttccccagtcatcaaaggttgttttgtggagtggatgaaatatactgcatattcttgggggatttgaataatttgagcagcctgctaaagcagtatgggctgtcaaagggcaccaatgaagccatgtttatcatcgaagcatatcggaccctccgagaccgtggtccgtacccggctgaccaggtccttaaggatcttgaaagcagctatggatttgtggtgtatgatagcaaagctggaagtgtatttgctgcattgggtgcagatgaaagggttaatctctattggggtgt

SEQ ID NO: 52604 - DNA, 382 bp, Gossypium hirsutum
  Clone ID: LIB3197-056-Q1-M1-C3
cccactctcactctatttttctctagtaattgctgcaatcggatttgttgaaagatggctgagggttcagctgcagttcccagcactgagttgttggaatggccgaagaaagataagcgtcggttccttcacgccgtgtaccgtgttggcgatcttgatcgtaccatcaagttctacactgagtgttttgggatgaaattgttgaggaaaagagatattcctgaagagaaatactccaatgcctttcttgggtttggcccagaggagtctcatttcgttgttgagttaacttacaattatggagtatcatcgtatgatattggaactggttttgggcattttgcaattgcaacacctgatgtctaacaaatggttgaagaca

SEQ ID NO: 52605 - DNA, 324 bp, Gossypium hirsutum
  Clone ID: LIB3197-056-Q1-M1-C4
accaatctaactctatttttctatagaaattgcggcaatcgcatatggtgacagatgtctcgaggtacatctgaattttacagaaattagtacaaatcacttgatcaaaaagataagcgtcggttccttaacaccgtgtaccgtgttggcgaacttgatcataccatcaagttctacactgagtgttttaggatgaaattgttgaggaaaatagatattcttgaagagaaatactccaattcctccttgataagatctagatgactctcatttcgttgatgagttaacttacaatcatggagtatgatcatatgaatttggaac

SEQ ID NO: 52606 - DNA, 428 bp, Gossypium hirsutum
  Clone ID: LIB3197-056-Q1-M1-C5
cggacgcgtgggagaagagatctccacgcaaaaaatttacttttaatttcttcttgttcttcttctctagatctactgttttatttctaaaaacttaatttttcttgttattattattaatattatttattcatgattgacaagtaaaaaacgctgattcctttacacgtaattcgattatagccgtctgattcttttcccccagaatcaaaagccatttatctgagaaaaagaggactgacatctccgtatttattttaggaatttgaagaccagaagcctgaagattgggatgacaagggatacatacctgctcctgaagacagaaagcctgatggttatgatgacatttcaaaagacattcctgatcctgatgcgaataagcctgaataatgggatgatgaagaagatggtgaatggacaccctc

SEQ ID NO: 52607 - DNA, 378 bp, Gossypium hirsutum
  Clone ID: LIB3197-056-Q1-M1-C6
gagaagctgaaatctatttatatatattattataaatgacttgtaattctgcagtatcagtcaaaacaacaatatcatgaattacagaatattttgctaccaattctcacttcaaacattcaatggcagagcagaaatctgtagaactattaactatacacaacaaacaagacattgcgtacctgctcttttgcttgtgtcagtgattccttgcgtttgaagcaaaagatataataaaccgtctgaagtaagagattgtaaagagtcatcgaaatcagccactccatcattgctcgaaggtagtcattgtccacgcagggggtgacaatggcggaacagctgctgcttcatcagttgcattagtttcaatttccagca

SEQ ID NO: 52608 - DNA, 231 bp, Gossypium hirsutum
  Clone ID: LIB3197-056-Q1-M1-C7
cccacgcgtacgaaatagattccatgaccactctatttcacttattcaaagaatcattccagttttctgctgtgagtgctgatcgtatgagctctaatggaccatgtggctccttcacgcacaccgctcattgacgtggctctgagcgagctttgaagtcttaacagagctgtaatagccgaatgtatgagacctatgctttccgtagacagcgccatactcaccgctggg

SEQ ID NO: 52609 - DNA, 385 bp, Gossypium hirsutum
  Clone ID: LIB3197-056-Q1-M1-C8
gttcgtcgctgattatcagttttagttatttttcttctttggtctttacattctttacgtgtacacaacagatagttagtaatggccgatcaaggagaacgtccagctatcggtatcgatctcggtacaacttattcttgcgttggtgtttggcaacatgaccgtgttgaaatcatcgctaacgatcaaggtaacagaacgacgccgtcttatgttggttttactgataccgagcgtttgatcggagatgcatgcaaagaaccaggttgcaatgaacccgattaacaccgtcttcgatgctaaaaggatgattggtagtagattcactgatttttcagtgcaaaagagatatcaaattgggggcattcaaggtcatagcaggacc

SEQ ID NO: 52610 - DNA, 378 bp, Gossypium hirsutum
  Clone ID: LIB3197-056-Q1-M1-C9
cactttcccgagaaaatgagagaaatccttcacatccaaggtggccaatgcggcaatcagataggagccaagttctgggaagtcgtatgtgccgaacatggcatcgattcaacgggtcgatatggtggtgactcggagctccagcttgagcgaatcaatgtttactacaacgaagccagttgtggccgttttgttccccgcgcagttttaatggatctggaacccggtaccatggatagcgtaagatccggtccttacggacaaattttcagacccgataacttcgttttcggacagtcgggcgccggaaacaattgggctaagggacattacactgaaagagcggagcttatcgattccgttcttgacgtaattaga

SEQ ID NO: 52611 - DNA, 329 bp, Gossypium hirsutum
  Clone ID: LIB3197-056-Q1-M1-D10
gatgaacacgagcattccataggtgggtcgtcgaaatcctctcaatgacagtcacgatctattcaagaggggactgtaaactgcagcagtgattgccggatacgctgatattatgaaaaatacagagaatgcagacggttggagatcgctaggaataacccatgctgaaaatgatgatgaccatcacgttggagagcaaagctcgacctgctagaatgttgtgaatgggttaagatacggatggatgacataccgaccaaacctggactgatttctcaaacaggtccaccttacaaacgctatgattcttactttactttggaaataaa

SEQ ID NO: 52612 - DNA, 387 bp, Gossypium hirsutum
  Clone ID: LIB3197-056-Q1-M1-D11
catttttgttcaaggaccacttcttcccttccattttactttgttttagttgccataacgtcaccttccaatacaacccacaatgaggcaacaatatgtcttcactactctcacgttgctcatcctgttttccctcagttgttcaacaacattagcccaatctccggcactggccccggcaccttctggcccgacaaacgtcaccaagatcctcgaaaaagccggtcaattcaccctcttcattcgtcttctaaagtccactcaagtggccaaccagctgctcggtcagctcaacaattccaacaatggtatgaccgtttttgcaccaacggacaatgctttctccagccttaaatcgggcacattgaattcactcaccgatgaaca

SEQ ID NO: 52613 - DNA, 390 bp, Gossypium hirsutum
  Clone ID: LIB3197-056-Q1-M1-D12
gctcctttatggccgccaccatggatgatagccgtttcaaagacgccacctgctaatatgcttgcttctattactttcgatattgaggtcttagagccgggacccttaagtcatgctgctccactaacaatcctagcgatggccttatccgacgactcagcgtcttccatctgatcctactcggagtgggcggacatatcggtgccggcttattcgttgagaccggaaccgtcgctcgtgatgccggtccaggagtgacatattagtggcatactagcgggagcatcatgtgagctgaacgcattgtgctacgcccagttagctacacgggttccctgcgtagtcagaggcgcgtacttgtacacgtacacggtcttcaatgaaataacg

SEQ ID NO: 52614 - DNA, 420 bp, Gossypium hirsutum
  Clone ID: LIB3197-056-Q1-M1-D2
gtgccataaacatgtttctcccaatctttttcattttctctttcctattttcctccaccaacgcagccgacttctgtgttggggacttgaatggccctgtaggccctgcaggctattcttgcaagaagacagccaccgaagatgacttctctttctccggcctcctccgtaccgcaggcaacacttcgaacctcgtaaaagctgcaataacaccagccttttcgactcaattcccgggtgttaacggactcggcatttcaatagctcgtttggatttagctgttggtggagtgatacctatgcatacacaccctagggcttctgaactcattcttgttatggatggcacactttttgctggtttcatatcctcagataacaaagtttactccaaatctctgaatgaaggagacattatga

SEQ ID NO: 52615 - DNA, 179 bp, Gossypium hirsutum
  Clone ID: LIB3197-056-Q1-M1-D3
aagaaaaaaacatgaaaaaaaaaaaaaaaaaaaaaaaaatctaaaatattaaaactacaccaagcgcagactacttacgtgtatgaggactaggggtggccctgttggccgctgcaggctatttttgggggaagacagtcaccgaagatgactgcggtgtctccggacttctatgggct

SEQ ID NO: 52616 - DNA, 429 bp, Gossypium hirsutum
  Clone ID: LIB3197-056-Q1-M1-D4
acatcatcgaaggtcagtagcagccagtttggttgagggtgtgtatatcttggagcgagaccgtcaggaaaaacgtgaaggttctcaagcattggctcctccctggtgggagttctttcattttaagttggttcgtaagctgatagatgatgttgatttttgcatctttggtgctatttacgagtataagcctccatcgtctcattgtaatgactcaatagtctcaattgatggaaatccccgctatgtgattgcgttccgaggtaccataactaaaccagactccttcacaagagactttgagttggatatccacataatgcgaaatggactccaccagacatctcgctttgagattggcatgcaagctgttcgaaacatggttgctactgtaagtgcttcgaatgtctggttagctggccattccct

SEQ ID NO: 52617 - DNA, 390 bp, Gossypium hirsutum
  Clone ID: LIB3197-056-Q1-M1-D6
tagaaaagagcatgcatgcttcatatcccagatctctatttgtgtttctccttgaaacccaaattttgccaaataagaaaagcttctgagaaaatggtgcccagatcattgatctatgcattagtatctcgtggaggagttatattagctgagtatactgaatacagtgggaatttcaattccatagctcttcaatgcctacaaaagcttccttcttcaaacaacaggttcacttacaactgcgatggccataccttcaattatcttgctgacaatggatacacttattgcgttgctgcagatgagtcagctggaacgcaagtgccgattgcttttttggagcgtatcaaagatgatttcgtgtcgaaatatgataacgggaaggctgct

SEQ ID NO: 52618 - DNA, 427 bp, Gossypium hirsutum
  Clone ID: LIB3197-056-Q1-M1-D7
cccacgcgtccgaagaaaaaaatgaagctcttgtttctaactttgctgctttgttctcttcttctatgttcttcagtttttgcaccaacaatggctcagcctcgttcacctttttgtgaagggaaatgcaaagggaggtgcaataaagcggcggtttgggatcggtgcttcaaatattgcggcatatgttgcgaggagtgtcaatgcgttccgtccggtacttacgggaacaaacacgagtgtccttgctacagagataaggtgaacaacaagggcaaacccaaatgcccttgaaaatgaaatatattcgagttcgggatttaatcaaacttaaagatcgaggacgaacaggccatatatatatatatatatgcatgttgatgatgatgttattataaaaataaacctggtttggtgcttgtatttt

SEQ ID NO: 52619 - DNA, 401 bp, Gossypium hirsutum
  Clone ID: LIB3197-056-Q1-M1-D8
gttgatttcaagtctttttaaaaatatctttctaaacaaaaccatttttattttttaatttaaaaacaaggtgctgcaaattggatttgcgaaacctggatctccaaaccttttgtttagtttcaaatcctgatccttccgttcaagattctgtcattcaatgtcgcacaaggctctcccgccattcagtagatgcttgcgccttccagctccattcgtggagacctttccacctccagcaagctctagactcctccgatccccaacttactcctcctaagctttcctcctccaatggcttccatcccaagcgtccttgcctctccgatcgtaccacttctttttctattgatctctccaagctaaccctcctcgacgatgataacaacaacaaccctata

SEQ ID NO: 52620 - DNA, 420 bp, Gossypium hirsutum
  Clone ID: LIB3197-056-Q1-M1-D9
attttctgatatgaatccatatgttggtcatcaaaatcctttaaaagaaggtcaagagctattcaggaaaggacttttgagtgaagcagtgcttgccctagaggctgaaattatgaaaaatcctgagaatgctgaaggttggagattgctaggaataacccatgctgaaaatgatgatgaccagcaggtaggagaacaaagctcgacatgcaagattgtcgtcaatgggttaagagaaggatggaagacagaggagccaaaccttgtgggttttctcaaacagctccacctcacaaaccctttgattcttactttttctggtaaataataggttctccccgtaaccctcagattgtatcttttttggaattactagatcttccttatgtttttgataatgcatcggactcaagggatagt

SEQ ID NO: 52621 - DNA, 425 bp, Gossypium hirsutum
  Clone ID: LIB3197-056-Q1-M1-E1
ggtcagcaaattgtttgagctagctagctcttactcaaatggcaaccaaaacgatgatgttgcaaatattttcacttttcttctttttgttcagtatctgcaactccattttccttggtgctaatggagatgacaatggtggttggcaaactgcccatgccaccttctacggtggtgctgatgctaccggcacaatggggggagcttgtggttatggaaacctgtacagtcaagggtatggaacgagcacagcagctttgagcactgcacttttcaacaatggcttgagctgcggtgcctgctacgagctccggtgcaacaatgatcctcaatggtgcattagtcgaaccataaccgtgacagccaccaacttttgtccccctaactatgctttatctagtgacaatggcgggtggtgcaatccc

SEQ ID NO: 52622 - DNA, 357 bp, Gossypium hirsutum
  Clone ID: LIB3197-056-Q1-M1-E10
ccgacccatggcatccatctccaacgctttctccctttccctcccttgcaaccgcattgccaactcctcatctgacttcaaccccatcacctccggcctttccggtttggataccggtgagttcagaccgggacgagttgctgtgtctaaaccgagtggaatcagggggaggatttgcagccaatgcaactcccgtgatggatcaaccagtcggtgaaaagagctccagagctaccactattgtcgaggtggattggagaaatcggagctacccaatctacattgggtccggattgtttgatcaacccgaactacttcaaaagtgactttattcactaagattagtgtttagatttt

SEQ ID NO: 52623 - DNA, 335 bp, Gossypium hirsutum
  Clone ID: LIB3197-056-Q1-M1-E11
atcaaaaatctttgtttattaaaaaacactggttcaggctgtatattactgacgcataaacggatggctgtgaggaccatattactagttcacttgatgaatgctgtttcttatatggggaatgctggaccacaaacatgcactgtagatgattagagaaaatggggtgaagatggataatgggaagggtgattattggatgtagtttgcaagagtaactatgtaggaacttctagcaagaatacacttacatacaaggggtacaacgcataagaagcgtaattagggacgaaaatgtatgacaggctgagatttaaaggagcatatcggcatac

SEQ ID NO: 52624 - DNA, 428 bp, Gossypium hirsutum
  Clone ID: LIB3197-056-Q1-M1-E12
gaaaacatgggacaatgggtggattattggcttaactatggtgctgaacccaaggaacctcaaacttgggaagctcagaatcagaaccagaatgtgtttgcttcaaactttgttcccttgtggattgatttgttcaactcagatactcctctggtggaaaaggtaacaagaagtcttcaaagttcaggcctgctttgtgctgctgggattgcaacctctttgacaaattcgggacaccaatgggacttcccaaatggttgggctccaattcagcacatgatagttgaaggcttgtggagatctgcatcgatagaagcaaggaaagtagcgagagacataactgaaagatggatcagaggcaactacgtggcctacaagaaaacagggacaatgcatgagaaatataacgtggaaaagtgtggcgaata

SEQ ID NO: 52625 - DNA, 356 bp, Gossypium hirsutum
  Clone ID: LIB3197-056-Q1-M1-E2
gggaaacaatgggtcgcattactggtggcatgaaggtgaaagctgatagggatgagtcttccccttatgcagccatgcttgcagcccaagatgtttctcaacgctgcaaggagttgggtattactgcccttcatataaagctaagagctactggagggaataagaccaagacaccaggtcctggcgcacagtcagcacttagagcccttgctcgttcaagcatgaaaattggacgcatagaggatgttactcccattcccactgacagtacccgtagaaagggaggcagacttgggagaatgctgcgattctttgcttcgcatctgttgctcactggtgctgctcctccaatatgc

SEQ ID NO: 52626 - DNA, 161 bp, Gossypium hirsutum
  Clone ID: LIB3197-056-Q1-M1-E4
aacttactaggtgtctttcttctcgcgactgacagcttacatacacctgtaacagccacatagaactcgactgattgattgggacaaagcggcgcgatggaacgtgcatatgctcacgcattgtgtaatctgccgagcgctctataggtgctagtgatgaa

SEQ ID NO: 52627 - DNA, 395 bp, Gossypium hirsutum
  Clone ID: LIB3197-056-Q1-M1-E5
ctggagactgccaagagcagctcatctgttgagaagaactatgagttgcctgacggacaagtcattactattggagctgagagattccgttgcccggaagtcctcttccagccatctttcattgggatggaagctgctggaatccatgaaactacctacaactctatcatgaagtgcgatgtggatatcaggaaggatctctatggtaacattgtgctcagtgggggttcaactatgttccctggtattgcggaccgcatgagcaaggagatcactgctcttgctccaagcagcatgaagattaaggtcgttgcgccaccagagagaaagtacagtgtctggattggaggatctatcttggcatcactcagcaccttccagcagatgtggatttc

SEQ ID NO: 52628 - DNA, 193 bp, Gossypium hirsutum
  Clone ID: LIB3197-056-Q1-M1-E6
gtgtcgactgcactgaccagtttttctgcttggagggactactatacccatgccggccttaggtgcacgttaggctctgaaacatcacgcgccccagacgaccgtatgcaagcatcgcacagtgtgatgccatccgcagggctccatgaaacctcgtacaactctatcataaggagagaagtccataacagga

SEQ ID NO: 52629 - DNA, 372 bp, Gossypium hirsutum
  Clone ID: LIB3197-056-Q1-M1-E7
ggggaaatggcgatcacactgaacaatggatttaagatgccagtggttggtttaggtgtttggcgtatggatggaaaagacgttagagacctcatcatcaactccatcaagcttggttatcgtcattttgattgtgctgctgactacaagaatgaagcagaagttggtgaggcattgtctgaagcattcaaaactgggcttgttaagagagaggacctctttattacaaccaagctttggaattctgatcacgggcatgttcttgaggcctgtaaagacagtcttaagaagcttcaattggattatctggatttgtatctaggtcactctcccggtgctgtaaagcacaactgaatcggtcaaacggacagt

SEQ ID NO: 52630 - DNA, 364 bp, Gossypium hirsutum
  Clone ID: LIB3197-056-Q1-M1-E8
cctttatttaatgaacttctttttacttttgtttttcccgttgcctttgtatgaatcttccttgcaattctttggtttatgtattgctattattgggcctttagagtaatcaatatcgatttatgccttatttctcattcatatgtaataatttatgaagtgcggtggcagtggaggtagagatggtaaaaggctttgaaattgggtgttagaatcgtctattgagaaacagattttaagctatcagtttggggaaataaaattggacatatgcatttcgagattctcgtgagatacatccccacggttaaatgcttcgcagattttaacatctataaattgttatcatctcttgtcctgaaaa

SEQ ID NO: 52631 - DNA, 418 bp, Gossypium hirsutum
  Clone ID: LIB3197-056-Q1-M1-E9
cgtttagctcctttaacattgcataccgccaccaaacacagtcctacatttttggaacttctcttctcttctctttccaaaaagtaaaaaccagagagagatccaaaaaataatggtgcacggatttattaatccatggagaagggtgttatcggaaactacatattctctgcgacgggggcaatttggtcgacgacgctgcttctctctggtggctcacaaagctgagcttgataaaaacaatatcgattctgttcctaaattgccgtactttgattactctacgcctccttatacacggtcttccgccgttgacattctttacaaacgcaaggagtatctcagccctttcatgttgtactgttaccacagaccctttgaacgtatggatgggaggatgcagtatttgttcgatgag

SEQ ID NO: 52632 - DNA, 428 bp, Gossypium hirsutum
  Clone ID: LIB3197-056-Q1-M1-F1
ctgaatataatcttttgcttacggtttttcctgcgtgcttttgaattggggttttgagttattctcaatggcggacacagagacgtttgcttttcaagctgagattaaccagcttcttagtttaattatcaacactttctacagcaacaaggagatctttcttcgtgagctcatcagcaacgcttctgatgcattggacaagattagattcgagagtttgacggacaagagcaaacttgatgctcaacccgagctgtttatccacattgtccccgataagataaacaatactctatcgatcattgatagcggtattggcatgactaaggccgatttggtgaacaatcttggtaccattgctaggtccgggactaaggaattcatggaggcattggcttgtggtgctgatgttagtatgattggacaat

SEQ ID NO: 52633 - DNA, 425 bp, Gossypium hirsutum
  Clone ID: LIB3197-056-Q1-M1-F10
catatctaaacccccatcctgttatttttcaccgccaaaagaagtcactatgaggaaacgcacactttacgtatggggagtcgccattctatgtttcgtagtgttgatgatcgtcactcccgctatccctcagtctcaagagtaccacaatttctctgatcaacgccaattcttaggtatacccaatacgttaaatgtcatttctaattttaccttcttagtgattggtgttataggtcttgtactgtgtttgtataataataatttcatgttcaattggcaaggtgaactatggggatggacttgttttttcattggtgtggctgatgtttgggatggctcctcatactataatcttgacccaaatgattcccggcttgtgtgggatatattgccgatgacaattgcattcacatcaatcatgg

SEQ ID NO: 52634 - DNA, 371 bp, Gossypium hirsutum
  Clone ID: LIB3197-056-Q1-M1-F11
agaaaatgtaactggagtttgactgtcgcaggatgtaacttgaattaggaacatttaaaaaaaaaaaaagaatcaggcaagctcatgtttgaaagtcagacggcaatcgcttcttctcacagtcctcaccttcggaaacctggctccaaatctgtttcttctgacctaggggctggtgaacctggaaatagtgttcaagagggttacgtgtttcctttgacggtaggtgaaatgaaggcttctaattcacccatgcacaccacatccataatgccttctcccatctttctatggagatttaaggttatatggtttctgatatgggccttcacttgttgcaagattggatgggattcagtcatgagaatgag

SEQ ID NO: 52635 - DNA, 434 bp, Gossypium hirsutum
  Clone ID: LIB3197-056-Q1-M1-F12
cagattcaaaaagaaataaaggtagaagaagcaatggccactcttacagtgcccacgacagttccttcagtgtctgaagattgtgaacaactaagaaaagccttttcaggatggggaactaatgagggcttaatcatagatatattgggtcacagaaatgcggagcaacgaaacttgattcgaaaaacctacgctgaaacctatggagaggatctcctcaaggcactagacaaggaactctcgaatgactttgagaggctggttctgctttgggctcttgatcctgctgaacgtgatgcccttttggctaatgaagccaccaaaaggtggacttcaagcaatcaagtccttatggaaatagcctgcacaaggtctgccaaccaactgcttcacgcaaggcaagcttatcatgctcgttataagaagtcgcttgg

SEQ ID NO: 52636 - DNA, 418 bp, Gossypium hirsutum
  Clone ID: LIB3197-056-Q1-M1-F2
cttgtatcctgttttgattctaagctttgtttgcttacttgtgtgtctgttcatcacatcatctacatttccctccactgtttctctcttctatattttcccaagattattttctctttccgttttttcctccctattttttttttctcgggagacttttttttaggtatacccagatcttgtttagttccaagctttaggttgtcatcgttttctcgaggttttaaactatgggctcttgaatttgtgaaacaaagggagatatattggttaaaaactagtagcagtgtattgaatcaagttttacaaaaaaagaagttaaaaagaaagatgaaaatccagtgtgatgtttgtgagagagctccagcaacagtgatatgttgtgcagatgaggctgcactttgtgctaaatgtgata

SEQ ID NO: 52637 - DNA, 409 bp, Gossypium hirsutum
  Clone ID: LIB3197-056-Q1-M1-F3
catacctgaagaggctattccgggaccttttcattcgagaaggttatcagtttgactgcgtatttgattggaccatgctgagatatccacaggctgcctctagctcaagagtacggccaagcccaaagccgggtttaaatcctcaaggagtatctgctgaaagaaccggaaggccttcagttggtcaagagattcgagaaaggttctctggtgctgttgaggcatttgcaagacggaatggatcagggcatggtgatcagtctagacacagatctcccgacaatgcgctatcatccaaagacacgcaacctggttctgatagggctcactcttcctcaagaaatggtagtacttcaaagaggcctgttgtatcaggcagccgacctaactcctctggtgagcctagtga

SEQ ID NO: 52638 - DNA, 432 bp, Gossypium hirsutum
  unsure (1)..(432): unsure at all n locations; Clone ID: LIB3197-056-Q1-M1-F4
atttgcaaaccggcctcgtactatggccggggatcttatgacgtacaactacactactttcgtttgggctccttacggatcactttggcggaaccatcgccgtctcagcgctgttgagatcttctgttctaacagcgttgaaaagttttcttccatacgtgaagaagaagttgcggactttgttcgtcgcttgtttgaggtctcatcaggcaacggcacccaaaaggtggacttgaagtacttgttttgtctcttgacggcgaatgtcatgtggaggacggtggccggaaaacgtggggtcgaggatcctaaggacgtggaggcagaaaagatgttcttcacggaatttaagagcttgttttttccgagcctagggaccaacatatgtgatntcttcccagttttgaggtggattggtttcctagggattgg

SEQ ID NO: 52639 - DNA, 432 bp, Gossypium hirsutum
  Clone ID: LIB3197-056-Q1-M1-F6
cccacgcgtccggaaatttcgaaggctttgaaaaaaaaaaaatcgaacgaagaagaatttgttaagcgatcgatctgtggattacgatggaagtgcctgtctcatgggatgctctacgcaaacaggcaaggaaactcgaagctcagttggatgagcaaatgaattcatatcgtaagttggtctccagtaaggcttcgataaaaaatgacttggaagagaatggtattgaatctggtatcgaccgactactaaaacagctacaagaagtaaatatgaaaatgcaagactgggtctcatctggtggatctgaaatggtttctcataccttgactaggcatcaggaaattcttcaagatctcactcaggagttctatcgtcttcgctctagccttagagctaaacaagaacacgcttctctactgaggattttag

SEQ ID NO: 52640 - DNA, 420 bp, Gossypium hirsutum
  Clone ID: LIB3197-056-Q1-M1-F7
ctccttgccgattcattcctaagaaaattttcaacgttatttcaaaaagcagagaaaagaacgttaaggaggaaagatgttgggaatagtaaggcaaaaaatgttagggcagtcattgctgaagattcgtcctgcaatatcggtgttacgaagctactcatcagcagcaaaacagatgacagtgagagaggcattgaactctgctcttgatgaggaaatgtcagctgatccgaaagtctttttaatgggtgaagaggttggagaatatcagggtgcatacaagatatccaaggggcttttggagaagtatggacctgagagggttcttgatactccaattactgaggctggttttgctgggaattgggttggtgcggcttactatggtctgaaacccgtaattgagtttatgacatttaa

SEQ ID NO: 52641 - DNA, 162 bp, Gossypium hirsutum
  Clone ID: LIB3197-056-Q1-M1-F8
ctcttcgccggttcattccgaacaaaatagtcaacgatcgttaattaggccgagaatccttctacgctgaggaaagatggtatgcatagtaccgtactactgttagggcagacattgctaaaaatttaacctgatatatcagagctccgaagctactcatca

SEQ ID NO: 52642 - DNA, 410 bp, Gossypium hirsutum
  Clone ID: LIB3197-056-Q1-M1-F9
gggtgagtgaacaattcactgccatgttccgtaggaaagctttcttgcattggtatactggagaagggatggatgagatggagttcacagaagcggagagtaacatgaatgacttggtttctgagtaccaacaataccaggatgcaactgcagatgatgaagagtacgaggaagaggaggaatacgaggcagaggcttaaaatctaatggaataatttggatgttttttgttgtgttttggattgggcttgtggagtgtgttggtgcaatttctcactgcctgttttgggtctttggatcactgtgttgttgattgtgtcgactttagttctgtcctcacagcttacagagtatatgttgttgtattgcttggtgattcatcttataagtaatttcagttcaccttaggt

SEQ ID NO: 52643 - DNA, 417 bp, Gossypium hirsutum
  Clone ID: LIB3197-056-Q1-M1-G1
cccacgcgtccggatttgctctgctttcgccaaacaaacgcgagatttgtagatttatttcccttgtctatctgcctccgaatcaatggctttgccgaaccagcaaactgttgattatccgagcttcaagctcgttatcgtcggtgatggaggaactggaaaaactaccttcgtgaagaggcatctaactggagagtttgaaaagaaatacgagccaaccattggtgtggaggttcatcccttggacttcttcactaactgtggcaaaatccgtttctactgctgggatactgctggacaggagaagtttggtggtctcagagatggttactacatccatgggcaatgcgccataattatgtttgatgttactgcccggttgacatacaagaatgtccaacttggcattcggatctt

SEQ ID NO: 52644 - DNA, 392 bp, Gossypium hirsutum
  Clone ID: LIB3197-056-Q1-M1-G10
ccaatctttcattctttgctggtgaagtagtaatatctatagcatacagagatggagaggcaaacaagcaagcaggtttgtttgttgatgtgggttttggttgctgcctttttctcccacaatagggtcattgcagtgacctccactggccttggtgagcagaaaaactactatccagctcctgaccctcatgctggaactcccccttcaggttcacatggcacaccaccatcttcaggaggtggatcacctccctctcatggaaccccgtcacatggaggtggttaccacccttcaccaacaccatcaacgccttcgggtggaaattgtggaactcccccacatgacccttcaactccattaacacccatacacactccttcttatggtac

SEQ ID NO: 52645 - DNA, 385 bp, Gossypium hirsutum
  Clone ID: LIB3197-056-Q1-M1-G11
aattcctttaacagaagaaatggcgtgtacgagcatggcagcaatttctttaaatttccaacattttcgaaatcatagggtctctttcagtagctgttgctgcttcaacagaaaaatcaagttacatgaaaaccaacaaattcttagtcgcaagtacaggaggaagccaatatctgcacttgcctcgggtttggaggcatctatttcagatgcagatgacaaattgatagccttgaaagaagctaagatcgttgttgaatctaaagacgaaaacaagatccagcttcgagtggatgttactggaattgagacacaaaaggtatttaacaaggttttgacggatttggctcgtcaagcgccaacaattcctggttttcgtagagag

SEQ ID NO: 52646 - DNA, 415 bp, Gossypium hirsutum
  Clone ID: LIB3197-056-Q1-M1-G2
tgattattgaatttctttgggggggttgtttttggaagttatcggaatttgaagattctgttaggttagttttttgtttgcaacataaaaaagaaaaagaagttgttgttgtcggtgcaaatcaacctgcattgatggaatttggaaggagcggagcggtgtcctattgacggtgtatatgaggagagtggagattgaggttgttactggaaatgtgcaatgttgaagggatagggaaaaagggaggtatgagaatcggggtaataaaaggcggcggacgcggagcaagctgatgagagagagtggataagttgaaaaagagttcgagaatgaaggtcttgatcatacgcgccaccacatcggtgttgctgcggacttgcatagcacagttaacgaccttgggggagacatgggg

SEQ ID NO: 52647 - DNA, 398 bp, Gossypium hirsutum
  Clone ID: LIB3197-056-Q1-M1-G3
cggacgcgtgggaaattgttatctctgagggtgtcttaataaacgccttcgatttactttcggtttccatttacttctttatttctacgtttttgaatttttagtaagcgaaaatgagagagtgcatttcagttcacatcggtcaggctggtatccaagtcggaaatgcctgctgggagctttactgccttgaacatggaatccagcctgatggccagatgccaagtgacaagactgtcggaggaggtgatgatgcttttaacacctttttcagtgaaactggtgctggaaagcacgtccctcgtgctgtctttgtggatcttgagcctactgttattgatgaagtgaggactggtacttaccgtcagcttttccaccctgagcaactcatcagcggc

SEQ ID NO: 52648 - DNA, 424 bp, Gossypium hirsutum
  Clone ID: LIB3197-056-Q1-M1-G4
cagatttcattggccgtctacctggtgcttattcggttaaccagaagctaaattctgcggttaagaacaatttaagtgcaggttcctccttgactggtactggtgataggcaaagttcaaatagagcaggaaatcaagggtctgacctcctttctccacttgtagatcctcgttttatccaatacttacaaagaacttcttatgggacaactgcggctagtcctgattctttgcttgctgggaaccatggtggtactttgcatggggatttggatggccttcaaaaggcatacattgaggcaatactagctcagcagaagcagcagtatgaattgtcgcttttaggtaaagctggtggtctaaatcagggctattatgggaattcttcatatggtcttggcatgccatatgctggaaacccact

SEQ ID NO: 52649 - DNA, 435 bp, Gossypium hirsutum
  unsure (1)..(435): unsure at all n locations; Clone ID: LIB3197-056-Q1-M1-G5
cggacgcgtgggctcaatgatgtctacaacacacttgctagtattcctacttggagtggtgactctcaccactcccacatttggtacctatgagtcaccaaattatgggaaaccccctactcctgtattcaagcctcccaaggtgaaaccaccaccatatgaacctaagccaccagtgtatgaaccaccaaaaaaggagaagcctgaacctaagccaccggtttatgcacctccaaagaaagagaagcatggacccaaaccaccaatgtatgaacctccaaagaaggagaagcctgagccaaagccaccagtttatacacctccaaagaaagaggagcctaaacctaaaccaccagtatatgaacctccaaagaaggagaaacctgagccaaaaccaccgatttatacacctncaaagaaagagaaacctgaacc

SEQ ID NO: 52650 - DNA, 312 bp, Gossypium hirsutum
  Clone ID: LIB3197-056-Q1-M1-G7
cattttactacgctctctgaaatcttagttacatccatggcagcaacatctctaaatgcccctaacgctcctctccttcaaaagacccatcaaactcatgtctttctcaaacccatctccaccattccttgtcaaacctctgccaagcgcttctgcatctcttgttccgcaactacccaagatcgcctctccgtgcaatcccaatctcaagttcgggtctttaactgtcccgccggtcctgccaccttacccgagaacgatctcctcaaagcccaatacgagctttacaactggcacggatctggcatgagc

SEQ ID NO: 52651 - DNA, 367 bp, Gossypium hirsutum
  Clone ID: LIB3197-056-Q1-M1-G8
cggacgcgtggggttatctctgagggtgtcttaataaacgccttcgatttactttcggtttccatttacttctttatttctacgtttttgaatttttagtaagcgaaaatgagagagtgcatttcagttcacatcggtcaggctggtatccaagtcggaaatgcctgctgggagctttactgccttgaacatggaatccagcctgatggccagatgccaagtgacaagactgtcggaggaggtgatgatgcttttaacacctttttcagtgaaactggtgctgggaagcacgtccctcgtgctgtctttgtggatcttggacctactgttattggtgaagtgagggactgtacttaccgtcagcttt

SEQ ID NO: 52652 - DNA, 396 bp, Gossypium hirsutum
  unsure (1)..(396): unsure at all n locations; Clone ID: LIB3197-056-Q1-M1-G9
cggacgcgtgggcggacgcgtgggtgactgtgggctcaagactcgcaagtacgctgaggtgaaaccagccctgagcaacatggttgctgctgccaagctgctccgcacccaactcgccagcgccaagtgataggctcccgagatattggaaatccgaatcccataccattccagagagattaaaaagaaaaatggcaaagaagtttcttctatcttatcatttgaataactctgttgttgatgaaatatttgttacatgcccttggcgtccctttgatttccttatttttgggtgttcttttctctaagtatcatgtactttcttgggaatatcacatatatgctgtcttcagttnnaaaaaaaaaaaancaaaaaataaanaaannnncaanaac

SEQ ID NO: 52653 - DNA, 370 bp, Gossypium hirsutum
  Clone ID: LIB3197-056-Q1-M1-H1
cacgcccccatttattttatttttcaaacaaattttcccttcaattttcgtataatttcctaggaaaagaaatatgagagagtgcatttcagttcacatcggtcaggccggtattcaggtcggaaatgcttgctgggaactttactgtctcgagcatggcattcagcctgatggccaaatgccaagtgataagactgttggtggaggagacgatgctttcaacacctttttcagcgaaactggtgccgggaagcacgtccctcgcgccatctttgttgatctggagcctactgttatcgatgaagtgaggacttgtacgtaccgccagttattccaccctgagcaactcatcagtggcaaagaagatgct

SEQ ID NO: 52654 - DNA, 263 bp, Gossypium hirsutum
  Clone ID: LIB3197-056-Q1-M1-H2
ggaacacacaccctgcaaacgacctattcttccatcgaccttcacctaggccaatcgtgctccgttttattcacagctgatcagcctgcacaagactattacattgttgcctctactcgcttcaccaaccccgttctcaccactactgcgacccttcgttacagtaattctgctggtcctgtctctggtcctcctcctggtggacccaccatccaaatcgactggtctttgaaccaagcacgctctatcaagactaaccttac

SEQ ID NO: 52655 - DNA, 366 bp, Gossypium hirsutum
  Clone ID: LIB3197-056-Q1-M1-H3
aaagaaactcattgagacgaatgagttacctgctcctgctcctatagaacaacgatggacagctcgcagccagagcccgatgagtcctgcatcaagctcagcagaagatgatatattctcatgggttggtataatcatgtaccttcctacaatggatgcccgccaaagaaaggaaataacagaagaattcttccactacaggcatcttacgcagtcacagttgtgggataaatattctgcctatgaacattgggctaagattgaggtcccaaaggacaaggaagaacttgaagctcttcaagcgagactcaaaagcccgtttccagtcgatgcatataacaaagcaaggagggaattggattccaa

SEQ ID NO: 52656 - DNA, 343 bp, Gossypium hirsutum
  Clone ID: LIB3197-056-Q1-M1-H7
aaatcggtatcagctgaagaatagcactactggtgaaattaccataaaacatttaaacaaggagcaggaagccaatgagagcaacttccgcgatccagtcagctctgcagatctggaggttgttgagaagatgccactgttagagtggtttgctaatgaatacaggcagtttggctgtagccttgagttcgttaccaacaaatcccaggaaggttctcagttctgccgtgggtttggcggtattggaggcatccttcgataccaactagacatgcgatcatttgatgaattttctgatgaaaaaatgtatgatgattctgaataagcaataatcaaactaacc

SEQ ID NO: 52657 - DNA, 308 bp, Gossypium hirsutum
  Clone ID: LIB3197-056-Q1-M1-H8
ttctggtcagagatttgcagctaaaatgagaaacaaagagaagtaaataaaaaacccttctctttctttttctgcctttaattatcatacttgcctttttcttttcttttcctttcaagttaggaagcatggtgtaccccaatgaatcccttgaagactctccccagaagaaaatggggagaggaaagatcgagatcaagcggatcgaaaacacgacgaaccgccaagttaccttttgtcagatgcgcaatggtttgctcaaaaaggcttatgaactattaactctttgggacgctgacggtgctttg

SEQ ID NO: 52658 - DNA, 349 bp, Gossypium hirsutum
  Clone ID: LIB3197-056-Q1-M1-H9
gaaacagttgactgttggttttgaggtttttgcaaatgtcgactttaagccttccgccggttcttacctctcctagagacgatgctattcagctttaccgtgctttcaaggggctgggatgcgatactgcagcagtagtcaatattcttgcccatcgagatgcaactcagcgttctttaattcaacatgagtatagagcaatgtattctgaagaccttctcaaacgacttgtttcggagcttcgtggaaaattggagacggctgtcttgctatggatgcatgatcctgcaagacgtgatgcaatagtcattaggcaggcacttttaccagatttgacaaatcttgatgc

SEQ ID NO: 52659 - DNA, 455 bp, Gossypium hirsutum
  unsure (1)..(455): unsure at all n locations; Clone ID: LIB3197-057-Q1-M1-A1
cactagggctaagcagtatgcaaaggagtacgaggctcatgaaaaagagctgattcaattgaagcgggaggcaaagttgaaaggaggattctatgtagatccagaagctaaactcttgttcatcatccgaatccgtggtatcaatgccatgcacccgagaacaagaaagatcttgcagctattgcgtttgagacagattttcaatggtgtttttcttaaagtgaacaaggcaacaatgaacatgcttgacctggtcgagccttatgtgacttacggataccctaatctcaagagtgtgagggaattgatttacaaaagagggttttgggaagttgaacaaacagagaactgctttgacagacaatgcaatcgtggagcaggctctgggcaagtntggcatcatctgtgtggaagatctcatncatgagatcatgactgtgggacctcattttaag

SEQ ID NO: 52660 - DNA, 337 bp, Gossypium hirsutum
  Clone ID: LIB3197-057-Q1-M1-A11
ggataacagatttacctccgccgctaaggctgattggcggagagatttgggtcctcttcccaacaaaatcctaatacagagattagttgtttctttttcttaattgaattgaatcagtaataatagatggggaatttattggcaaagaaacccaagatcaccgaagtcgatcgagcaattctctcgctcaagactcagagacgcaagcttggtcaataccagcaacagctggaggctgtaatagaagcagaaaagcaagctgctagagacttgattcgtgaaaagaggaaggatagagctttgttagctttgaagaagaagaaagctcaagaagaac

SEQ ID NO: 52661 - DNA, 420 bp, Gossypium hirsutum
  Clone ID: LIB3197-057-Q1-M1-A12
caaattttgacattaaaaaaatgagaaactttgacaggaaaagtacgaagaacctaacaatggcgtaagtcttaaataattacagttgtctgtattatgttatgctcctaattgtttttattaacattttattattcttagaaaaagaagaatagccattagaaaactttgcactaaaggaaacatagggtgtctatctcaatcaaaaaactgaaattttatattaaaaaaagattcccaactttggatatgatgttcacgttcacctattattttatatgaatttaatctataaattacattaggaatcagtataaacatttttaataatacatatttaaatttaagttaaaattttaaaaaataatttttaaaatttaaaattcttagttccgtcattaaaaattgaaggattttttt

SEQ ID NO: 52662 - DNA, 410 bp, Gossypium hirsutum
  Clone ID: LIB3197-057-Q1-M1-A3
cacgcgtgcgattttcacactaataccaatctaccttctctgcgtcctttggacacattcaacataccgaagttcttttctgaaagacccatgttcgatttgcttgttagtagaaaaaaggatccatcaaagcaaacataatagaaccttaaacgaagcgtgcaataaagattgcatttggtgatatgaagattactttgatgtgggtatcatggacatgaatgtttggtttatttacttcttggatagccaccgacattggagtgcaagccatttcttgggctcatattgttatcatcaccttcattagtttacgtttcattgacatcattaatattatgggaggatttattgggggggctagctttaaacctaatggaactgcttccttctatgctgccggggtcggt

SEQ ID NO: 52663 - DNA, 408 bp, Gossypium hirsutum
  Clone ID: LIB3197-057-Q1-M1-A4
gtggaatcctctctcatgggttatggaagctgctgctatcatggccattgctcttgcaaatggaggaggaaagccaccagattggcaagactttgttggtatcataactctgcttgtcatcaactccaccatcagttttatcgaggaaaataatgctggtaatgctgccgccgcattaatggctcgtcttgcccctaaagcaaaggttcttcgagatggaaggtggaacgagcaagatgctgctattttggttcccggagacataataagtatcaaactaggtgatattattcctgctgatgcccgattacttgagggtgatccgcttaaaattgatcagtctgcactaacgggagagtcccttcctgtaactaaaagacctggtgatgggatttactctgtttctac

SEQ ID NO: 52664 - DNA, 398 bp, Gossypium hirsutum
  unsure (1)..(398): unsure at all n locations; Clone ID: LIB3197-057-Q1-M1-A5
caaggattctcctggtacaagagattcttatggagaaccccttgtgacaagttacaacaggcgcttctcgggcacggttgattacatatggcgttctgaaggtcttcagactgtcagggtgcttgctccaattccaaaacatgctatgcaatcgactccagggtttccaacaaagaaatggggtagtgatcatattgcattggcagcagagttggcattcacaaaaagcttgaccaatcaagaccccaagagttaagtggctagaaaggggttttttttatggtggttacttgcggggttttctaatctcacttgttgtattattgctgntatatgtcgatctgttttaccgactacaattagatattttaattcatcaggtactaattggggatgag

SEQ ID NO: 52665 - DNA, 353 bp, Gossypium hirsutum
  Clone ID: LIB3197-057-Q1-M1-A6
ctgaagtgcaacccggaaggatccgatccgataatactagcgaacgctaccgatttgagccattttggttacttccaaaggtcaagcgtcaaggagttcatcgttttcgtttctcgaactgttgctaaacgtactccttctggtcagcgccaatccgttcagcacgaagagtataaggtacatgcttacaacagaaatggactttgtgccttgggatttatggatgatcattatccagttcgaagtgctttttcgcttctcaaccagatgctagatgaatatcagaaacattttggggagtcttggagaaatgcacaagctgatagcactcaaccttggccgtatctgaatga

SEQ ID NO: 52666 - DNA, 381 bp, Gossypium hirsutum
  Clone ID: LIB3197-057-Q1-M1-A7
cacaatcaatgagtgcataggaccctctgacacgactcattggacttccattgtaggatgtctacaagaccggtggtctaggaactgagccggggggtcggcattgaacctgtaccgataggcctggaacgtgaggtacattacgacaccttggattgaccactgatgttaagattagatggaagcatcttgaacctatatagaaagcgctttctgttgacagagtcttgtttaatgtgctagaactggaggtaataaggtatttaaatcgttgatatgttgcctccaactacaaggatgatctctgacagggctgcggcctatttcacctgccaagttttcattattaaccatccaggacggagtggacattgttatgca

SEQ ID NO: 52667 - DNA, 405 bp, Gossypium hirsutum
  Clone ID: LIB3197-057-Q1-M1-A8
aatgctcaactctactcatcagctgtcacaggagcggttcttgcaggatctacattcatttccattgcggcaggcgatcgattgggtcgaagagttttacttatcagcggcggaatacaaatgattatatgtcaggctatagttgccataatcttgggggtgaaatttggggacaaccaagaactatcaaaagggtactcaatattggctgtgatagtgatatgtctgtttgatttggcattaggatggtcatggggtccattagggtggactggaccaagtgagatattcccactggaaatcagggctgcaggccatagcattacggatgctgtaaatctcctcttcacattcatcattggtcagtgttttgtagccatgctttggcatttcaagttcgggatc

SEQ ID NO: 52668 - DNA, 442 bp, Gossypium hirsutum
  Clone ID: LIB3197-057-Q1-M1-A9
cctggtcctttttttttttgttcaaaagcgaagccctaactcgcatgctgttcggatcttaatcgtagaagatccgattcatatctatctctgatctgatccaaaacgaaaccacccggcctctgagaaatgacgcgtcgctgctcgcattgcagccacaacgggcacaactccagaacctgcccgaatcgtggtgtcaagttgttcggagttcggttgactgacgggttggttcggaagagtgccagtatgagtaacttatcccaattcgccgggtccaattctgccgggcataacgggaatgggtcgggttcgcccggtgaaggtccggatcacgccgatggttatgcttccgaggattttgtccctggatcgtcttcgagtcgtgataagaaaaaaggtgttccatggactgaagaggagcatcgtatgtatctacttg

SEQ ID NO: 52669 - DNA, 424 bp, Gossypium hirsutum
  Clone ID: LIB3197-057-Q1-M1-B1
gacttctttagtgtggaggtcactgctttatcaagctatgaagacaaagaggagttattcaaagagcaggttgctcaactaaggcagcgttttttcaattctatttctccaggaggacttgctggtgacagacggggtgttgtccctgcctctggattttcttttagcgcacaacagatatggagagttataaaagagaacaaggatctggatcttcctgctcacaaggtaatggatgccacagttcgttgtgaaaagattgcaaatgagaagtactgtcgcttatcatctgatgaggattggttagcattggaagaagctgttcaatctgggtcagcatctggttttgggagaaggctgagctctatcctagaaacctactcttcagaatatgactcggaggcaacctacttcgatgaagatg

SEQ ID NO: 52670 - DNA, 393 bp, Gossypium hirsutum
  unsure (1)..(393): unsure at all n locations; Clone ID: LIB3197-057-Q1-M1-B11
cccacgcgtccgcggacgcgtgggtttggagcttaagaggaagaggcattctttcactcccaaaatgtcagatcttcaagcaccccttcgcccaaagaggaagaagggcttggtggactttttggtccagtttcgttgggtttttgttatattttttgtccttcctttttcggctctgtattactttctcatatatcttggagatgtcagatccgagatgaagtcctacaagcagcgtcagaaggaacatgatgaaaatgttaagaaagtagtgaagcgtctcaaacagaggaatccaaaaaaggatggtcttgtatgcacagcccgcanaccatggattgcggtggggatgcggaatgtagactataagagagctcgccattatgaagttga

SEQ ID NO: 52671 - DNA, 301 bp, Gossypium hirsutum
  Clone ID: LIB3197-057-Q1-M1-B12
gaatgaacgattaactatgcttctgtcggaaacaaataagctccttgttaatttaggagctgctgttcagcggcagaaagatgctaaacattcagatggtattgaagatttgaaggatttagattcagattcaccggagctggatgcttcgaaggatggaactcctggagattcacttcctgaagaagatataggtgccactgattctgatcagaatgatgaatccagtgatctacttgaaggtcagcggcagtataacttggctattcactcaattcaagaaaaggtagcagagcaacca

SEQ ID NO: 52672 - DNA, 390 bp, Gossypium hirsutum
  Clone ID: LIB3197-057-Q1-M1-B2
agtatttattctattaaagtctatactctatccttgttttagaactgaattgtgcttatgggacaaccctggttatttatactggatcgaattgaggatggagcttaaagcacacacatacgttaagtccaataatctactgtgcagccacgatagataaacaaattcccgaaaaagcgttggaagatcacagactgaaacacaggaaatccagctctttaaaggcagcccaaacatacgttgctctatgtcccaataatcaatcatatttatactactgtatccatagaaaccaaaaccaaaatgttctaattgaaagaaattgaatgtaatagctcatccatgggaagagagtgaagagaaaacattaaagctgaaaactatacttgt

SEQ ID NO: 52673 - DNA, 352 bp, Gossypium hirsutum
  Clone ID: LIB3197-057-Q1-M1-B4
caatgatgtctacaacacacttgctagtattcctacttggagtggtgactctcaccactcccacatttggtacctatgagtcaccaaattatgggaaaccccctactcctgtattcaagcctcccaaggtgaaaccaccaccatatgaacctaagccaccagtgtatgaaccaccaaaaaaggagaagcctgaacctaagccaccggtttatgcacctccaaagaaagagaagcatggacccaaaccaccaatgtatgaacctccaaagaaggagaagcctgagccaaagccaccagtttatacacctccaaagaaagaggagcctaaacctaaaccaccagtatatgaacc

SEQ ID NO: 52674 - DNA, 179 bp, Gossypium hirsutum
  Clone ID: LIB3197-057-Q1-M1-B5
tactgatgtatacatcacacttgctagtattcctacttggagcgtagactttgaccacttgcatattgattacctatgactcaccgagtattggtaaacccggtattaccatattgatgcatatgaacgtgatgccaccactatatgaaccttttggcacccataggtgaaccgatcaa

SEQ ID NO: 52675 - DNA, 334 bp, Gossypium hirsutum
  Clone ID: LIB3197-057-Q1-M1-B6
cactgatgtatacaacacactttctattattcgtacttggagcggagactctcaccacttccatatttggtacctatgaaccaccaaattattttaaacctcctactgcttttaccaaaccagacaaggtgaaaccaccactatatgaacctaagccaactcagtttgtaactctctgaaaagaataagcctgggcccattcatgttgaatatgctcatttaaagaagactaacttggactgttactcatggttagtaaaacgttcagttaacggttgcctaagttggaatcacttagatcggaactcgctgatatagaagagagagaagctta

SEQ ID NO: 52676 - DNA, 417 bp, Gossypium hirsutum
  Clone ID: LIB3197-057-Q1-M1-B8
cttgactgccacacatcacacattgctgttaagtttgctgagcttttgaccaagattgacaggcgatctggtaaggagcttgagaaggaacccaagttcttgaagaatggtgatgctggtatgattaagatgattcctaccaagcccatggttgtggagaccttctctgagtacccacccctgggtcgttttgctgtgagggacatgcgtcagaccgtggctgtgggtgttatcaagagtgtcgagaagaaggacccaaccggtgccaaggtcaccaagtctgctgctaagaagaagtgaagaggccaaaaggttttagccgtgaagcagattgagtgttttatctttggttatatgtggtttgaagtttttgcctgttgtatgtacgacttttaaaggtttgagatgctttggttt

SEQ ID NO: 52677 - DNA, 455 bp, Gossypium hirsutum
  Clone ID: LIB3197-057-Q1-M1-B9
ccacgcgtccgccctaacccctcttccttttcccctcgctctcttttccttgccaccaaaaaacatctttctgttcaattcaatcctcctttttctattcaaccataatgtcttgcttcattagcaaatacgccgatgagttggctaaaaacgctgcttacattggcacccctggaaagggtatccttgctgctgatgaatccaccggcaccatcggcaagcgtctttcaagcattaatgtagtaaatattgaagaaaacaggcgtgctctccgtgagctcctcttcactgctccaggagctcttcagtacctcagtggtgttattctcttcgaggaaaccctttatcaaaaaaccgcttcgggcaagcccttcgttgatgttttgaaggaaggtggtgtcctccctggcatcaaggtcgacaagggtaccgttgagcttaacggaaccaaccgc

SEQ ID NO: 52678 - DNA, 322 bp, Gossypium hirsutum
  Clone ID: LIB3197-057-Q1-M1-C1
cccacgcgtccgcaactaaatacaccacagccattgacatttgttctagcctctgtttgctggtgagagtggagtaaaccagacttcaacaactacaaaatggataggacttggatggaatttctcaagggcaagcaacgagtatcaaaatggagtgcaatcttttttagattttgcatttcacaattaaagccaagagaatatgattctttgcctgtgtaagaggtgtggcaatatctattggcattatcgtgaaagtgtctacgaacatctaattgttgatggcttcatttcggggtataaaaaatggattttccataga

SEQ ID NO: 52679 - DNA, 387 bp, Gossypium hirsutum
  Clone ID: LIB3197-057-Q1-M1-C10
cggacgcgtgggcggacgcgtgggtgaaagggaaatgtgtaccaggacggtctattgtacaaatattgacaagaaggtttctcaaactgaaatgaagagtttctttgaatcaacctgtggtgaggtctctcgcttgaggcttttaggggatcaagtccattcaactcgtattgcttttgttgaatttgccatggcggaaagtgccataattgcactgaattgtagtggcttggtgctaggaactcaggcaatcagggtaagtccttcaaagacaccagtgaggcctcgagttacccgtccgacattgcgttaactgatcaaccaatcattttaagatcgatggatgaaactgggtgacttccaaatgcttgtaatttcattttcgac

SEQ ID NO: 52680 - DNA, 406 bp, Gossypium hirsutum
  Clone ID: LIB3197-057-Q1-M1-C11
gttttgtgctttatacgagataaggtttttcctcttaaaactgatctcttgagacccccagaggaaatggaaaggcacataactgatttaattaaaaagagtttaggagatgtaactggagctgaattcaggatgtttatggactttttaaaaagtttgagcatatttggggagaaagctcctcctgagcgcttgaaggaacttattggaataattgaagggcaggctgatttagatgcacaatttgacgtctctgatgcagatcatattgataggttgatatcgtgtctgttcatggctattccattttttgggaagggtgcacctggcagcaagtttctcaactacttaaacaaacacattatacctgtttttgataagcttcccgaggaacggaagctggatt

SEQ ID NO: 52681 - DNA, 372 bp, Gossypium hirsutum
  Clone ID: LIB3197-057-Q1-M1-C12
aaaagtctttagcttttcgcttcgagagagaccatgttggtttaccaggatctcatctccggtgacgagcttctttctgactcattcccctacaaggaaatcgagaatgggatgctgtgggaagttgagggaaagtgggttgtgcaaggagctgtcgatgttgacattggtgccaatccttcagccgaaggtgctgatgaggatgaaggtgttgatgaccaagctgtgaaggttgttgacattgttgacactttcaggcttcaggagcaaccccctttcgacaagaagcaagttgtcgtgttcatcaagaagttcatcaagaacttgacaccaaaactggatgcggaaaagcaagagtccttcaagaaaaac

SEQ ID NO: 52682 - DNA, 420 bp, Gossypium hirsutum
  Clone ID: LIB3197-057-Q1-M1-C2
ggaaaaacccaaagaaagtaaagcaattgcagacggagtttgtgaaatttgtatcttgtggggcacattgcacagctgctattgcagaacctcgtgaaaatgatgggactatctcaaaaaggagactctggatttggggacaaaatcagggatcaaatttacctcgtttattttggggtgcattcactcctaacatggtatcgtcttgaattcctgatgtcttcaccccaagagacgttgctgttattgttttgttgctctttgtttttgaacctttctttaattcttcaaggtcctgtttatgaagtttgaggcttttatttatttaaaatttacgattcctgtcacggactatgaaaaggaaacttcatgctaatcacttttagacattttggttctctgggaccagtttttattcag

SEQ ID NO: 52683 - DNA, 452 bp, Gossypium hirsutum
  Clone ID: LIB3197-057-Q1-M1-C3
aatttctgtttcttccatcaatttttgcctcaaacgctgattcggtctctccttcactggaagtgctattgcccacattgatattggcttcttagggtttttgtttgtttttgaaggataaaccagtgaagttaatctcatgttgaagatcttcaagaagaaaacatctcccaaaggtattttagatttgattccatcgttgctttcttgctctcttttttctttttcctgcattttgcggtcattctctaattgctcacttcctctgttatgtggtcattggtttgtggcacaacaccatgtatgatatgtggttcaggagaaattgaaggagccttattgaaatacttgggggttgagcgcaatgaggtaacaaagacggtttattctcttgtggagaaatggaatgtatgggatgttgtgtaaatgctcctatgattgcagttgctgat

SEQ ID NO: 52684 - DNA, 286 bp, Gossypium hirsutum
  Clone ID: LIB3197-057-Q1-M1-C4
atcattcgtctctctcaccttaagcattgctcaaagcttacttggaactttgttcgccggtagaccaccaaccaatagtggtaaagggttggtcaggcctcagcttattcttgaaggataagccattgagatgaacccgacgcagaagaataacccctttggaggcctttttagaggtattatggatcagatctctctcctgagcggtgctaaaaagagataggtgcgggcatttgacggccgtgatgtaacttgctactggcgaaagtatgttgctgtaactatg

SEQ ID NO: 52685 - DNA, 331 bp, Gossypium hirsutum
  Clone ID: LIB3197-057-Q1-M1-C5
atacaagatcgtagcctcagcgaatcacaaaaacagctaggacaatctttctttcgctgtgcgtgcatgtgcacacgtgctctgaaagtactgcatgtgtgacgtatttgcagaatgttctgcccttcgcgatatgggaaaatcaccgggaaaatggattaaggctgtgctttttggaaagaaatcttccaaaactggttatcataaatgaacggagaatgttgccaacgtgaatgaggtgctggtttcatgccaggcatcagacgctgaagtccgtgtggctcctcctttcacttcacagcttaatcaatatgcttatgagagaattgag

SEQ ID NO: 52686 - DNA, 347 bp, Gossypium hirsutum
  unsure (1)..(347): unsure at all n locations; Clone ID: LIB3197-057-Q1-M1-C6
catcaactcagaacagctctaaaaagcttccaacattttgaagaaacaaagaatcaaacatgtcgaaggaagtgagtgaagaagggatgagccgaaaggactatgtggatcctccaccggcaccgctcatcgacgtggctgagatcaagctttggtctttttacagagctctcatcgccgaattcatcgctactctccttttcctatacgtcaccatagccaccgtcatcggccacaagaaacaacacgatgcatgcgatggtgttggtcttttgggtattgcttgggcttttggtggcatgattttcattcttgttactggcaccgccgtatctcangtggtcaca

SEQ ID NO: 52687 - DNA, 303 bp, Gossypium hirsutum
  Clone ID: LIB3197-057-Q1-M1-C7
atactgtatttattattatttgtgttttataaaacattttattatctatgactagataaactcaggccggccaacgtaatattattacgcaaaatttaaaactatacatacaaagctatcatcattaagtacataaaaacaaaagaaccatggtatatatggttctaaaagagaacaaaaataaacggaaaaagttttgagagaacaataagatagaagcttgtaaatacagctgaatgaaagaaaaccatcctgaaccatctaagtctaatagaggctattaagaatgtaaacactgagaaa

SEQ ID NO: 52688 - DNA, 443 bp, Gossypium hirsutum
  Clone ID: LIB3197-057-Q1-M1-C8
ctctctttctatacgaaattgaataattaaaaaaaataaaattttgatggaaaagggaaaatctgctcgacaagccgtagaaatctcgttgaagaagctcaatctgaacgctgatcgaaactttaaatcctctcgtttgatatcttctcttcactcatcaaagttacgcattgagaagacgaaacctcctagtttagtgagcttgtgccttggagttattggtcggcatctggaggaaattatcgaggatttaagtgaaattgctgttaattttcccgcggatattaagataccattggcagcaatagcaaggagaagaaaattactgaatgatgatgtcatcatctccttggccgatagttcttgggaaattcttgacctttctggttcagatgtttccgattttggcttagctaaagtagctgaaatgtgcaaatctcttc

SEQ ID NO: 52689 - DNA, 367 bp, Gossypium hirsutum
  Clone ID: LIB3197-057-Q1-M1-C9
aaaggaacaaatctcgagggaaaaaaaaaaaaacagaatgtaaaataatatggagacacagattattaagtagctcagaaaaggattctaaaaaattaatggaaaaatgatcaatctattcgattagaatatgcggtcaacaaaacataaggtgaagggttctgaatacgtggatattttaatttgaatagagatataattccgtacaaagctttcttgttttctttttgatttttactgaattctgcgatctttatataatggatcacttcctctgttatgtaaacgttgattggcgtcacaccaccaggtatgatatgtggttaaggctaaatggaaggggctttattgaaatactgattggttg

SEQ ID NO: 52690 - DNA, 183 bp, Gossypium hirsutum
  Clone ID: LIB3197-057-Q1-M1-D10
cttaaacgatcaaggaccagttggttcatagcataataattggatatatttgccatatcattacattcaaatacattcgattttgaggtggcaaaatgtgttccctactttcataatgcttaatcagctattcttacattgtttaacaacattacactaatgtctttctctgtaccatgtact

SEQ ID NO: 52691 - DNA, 430 bp, Gossypium hirsutum
  Clone ID: LIB3197-057-Q1-M1-D11
gagaaaaaaaaatacggaattcggtctcagaaatgggtgatttagtgcctatttacctcgtcatcctcgcttttttttgtactgctggagccattgcgttggccgttcttcatatctacaggcatcttttgaattacaccgaacctatttttcagagatacatcgtccgcatcatcttcatggttccgatttatgccttgatgtctttcttgtcccttgttctaccacggagttcaatctatttcaattccatccgggaaggatatgaagcttgggtcatttataattttctttctctctgcttagcatgggttggaggtccaggagcagttgtgctcagcttgagtggtcgagttttaaagccatcttggtatctgatgacatgctgcttgcctcctatgcctttagatgggcgatttatacggagatg

SEQ ID NO: 52692 - DNA, 435 bp, Gossypium hirsutum
  Clone ID: LIB3197-057-Q1-M1-D12
caaaaaaattcatgagagtgtggttatggatctttgccaagtcttagatcaggagttggatgctttagaaattgaaactgttcagaaggagacaatccatccaaggaagagttacaagatgaacagctcttgtgcggatattcttctctttgcagctcataggtggcctatgtcaaagcctagtcttgtggcagagtccaaggacatgtttgatcaaaaagcaagcaataaatattggatagatgtacagctccggtggggtgattatgactcgcatgatattgagcgttacactcgagccaaatttatggactatacaacagataacatgtctatttatccatctcccactggggtaatgattggccttgatctggcttacaacttgcattctgcatttggtaattggttccctggttcaaagccactgctcgc

SEQ ID NO: 52693 - DNA, 445 bp, Gossypium hirsutum
  Clone ID: LIB3197-057-Q1-M1-D2
tttctctcaatttcttcacatttcttgattttatacataaacatcccatctccatcacattctcaagcctattcaatggagtttttaatgaaaatatgtctccttttcctttgtggcctcatttctcactgtgttaacatgattttccagaagagaaatcagcaatgctatatgttgggttatgaatgtttcaaggctgccgatgacaggaagctcgacactgatgcgtgcgtgaaagttgtgttgaggaacaagaatcttggtctggaccaatacaggtttcttttaaaaaccattgttagttctggtcttggtgaagaaacttatggtccaaggaatgttattgatggtagagaagaggttccttcggaaaacgatgcacatgccgagatggatgagatcatgttcagcactctaaacactctgttcgagaaaacaagagttt

SEQ ID NO: 52694 - DNA, 355 bp, Gossypium hirsutum
  Clone ID: LIB3197-057-Q1-M1-D3
tccacacgagcgtgcaagcttaatatggcatgcttcttttgcttcccacgcagagcccctgctgtagcgcaatacggacaacatcgtcggatcacagcagctctcgattctcagatccatgcgatagacaatatcatggtcctcgaatcttacctacttatgctcaccaccgtggaatccgttgaccgatagctattcaaggggtgtatacggaaacttgttcactcgtcttgtttacttataactgttatcttaataactggaatctttgtcagttccactacaggcgatattgcactgcattgatgagaacccattcttgagaagcttattgctgctgggtagcacatgaagg

SEQ ID NO: 52695 - DNA, 351 bp, Gossypium hirsutum
  Clone ID: LIB3197-057-Q1-M1-D4
gttggccaacaagaattatctgctgttaactcctactcatgcttgtgcaaaagggtatactaacaactttagagtttcgaatttaccttccattgttgtaagaaaagagggttctgttcgatcgcaaggttttgtagcaatgcaggagaagggtggttcaacattgagcgatgattcgaggacgaaaaccccacatgttttgactgttgctggctctgattcgggtgctggggctggaattcaagctgatctcaaggcttgcgctgctcgtggagtctattgttctactgttatcactgcgctcactgctcagaacactgttggggttcagggtgcaagtaacgtaccgga

SEQ ID NO: 52696 - DNA, 354 bp, Gossypium hirsutum
  Clone ID: LIB3197-057-Q1-M1-D5
gccgcgcgtccggcaagatcagatgctcacttctactgatggaggcccgcagcggcaccttccatgacccagaattgttccatgctcccttgctgcaccaccctcggaggaggagcggcagacccttaaggggtttcgcagtgatatatgagggcggcgattcacctactctaactggccataacaatcactcaccaaggcccgaatgcattagcatgtgaccccagtgctggaactgaagctgaggctgattccatggcttgccctgctagaggaatagatggatgtactgcagccactgcacacccatctcttaatgacgaagttgtgtataattgaacaaacgctactggt

SEQ ID NO: 52697 - DNA, 448 bp, Gossypium hirsutum
  Clone ID: LIB3197-057-Q1-M1-D6
ctctcatatggcttcttcagtaatctaaatctcgctctctttctctctctctgaaattcttctcttttcattgttttaaacaacgtcgtttatgcattgcgatctgtttctttttctttcttagatagtttacgcgttttgcattaggaagttggagttttcgttttacttcctgtttgtttcccgagaaaacggagagaccctggttttgatatatggggcatcagttaatctgagtgtaaagaaaatggatcaacacaggaagtttaagacttgtactggagttctattggaggtcttgtagattcgttgattttagatgataagagctggacgcagcttgtaaaagctgcagttgagaatgttgattattttctggctgatattctatcattcttacgatgagaagtctgttcctgtcagtatcatacatttcatgctacagtct

SEQ ID NO: 52698 - DNA, 445 bp, Gossypium hirsutum
  Clone ID: LIB3197-057-Q1-M1-D7
ctcaaaacaccaatacgtgattgtgatgtacctcatatctttgattttttttctttttcttttgaagcggggagatttgattttcatgtttcataatcatccaccaacttttctaatttggatgttgaagacgaatttggattgaaaaaatagaaatacgaatacaatgtttcctcttttctttctcttttttttttgaaatagcgatcccaacttaaacgctataatcgctattttaatttcgattcttttcatcatttatactcatcatcatagtaaattagtaatggctgtcaaagaaacggcatgagaggacggagaggagataaacccggaaaaggaatcaaaatccgaggttgcggagagaagtgaatcattaaaacaaaatgaggagtcgtcatcgataagggaaccggacatttccgccgtccggtgattggattcc

SEQ ID NO: 52699 - DNA, 430 bp, Gossypium hirsutum
  Clone ID: LIB3197-057-Q1-M1-D8
cggacgcgtgggcaaaaatggatggttattgcagcagaaggggaatcatgtttttggtgtttgcatttgcagcaataagcagagggtgtggacaagaatcaaccactcttgttcctgcaatcatcacctttggtgactctgtggtagatgtgggcaataatgactatctccctaccatgttcaaggctaactatcctacttatggacgggactttgccaacacaaagcctactgggaggttatgcaatggataaatagccactgacatcactgctgaaactctggggtttacaacttatccaccagcttaccttagcccagaagcatcagggcagaaccttctgcttggagccaattttgcttcagctggctctggctatgatgacaaaggtgccatggtgaatcatgccatcacattgacccagcaatt

SEQ ID NO: 52700 - DNA, 438 bp, Gossypium hirsutum
  Clone ID: LIB3197-057-Q1-M1-D9
ggcacggggtctggtcatggctgatggggcggatgcttatcctattactgaggagaggttgaaggagattgaagcacagattgaggagatggcaaaagggtggccggagaaactgaaagatgaacggcatgaggagcatgagctggtgctcactcgtcgcagtaattatgtctgtaatgtatgcgacgaaatgggacaagtctggtcattctactgtgaggaatgtgactttgatctacataccaaatgtgcccaggagaaagaaaccaaagctgatgcaaaagaaggttgggtctgtgatggggaggtttgcactagagcttcatgaatgatgaccacgtatacaccaacacactagttggctgtgctggtgatgcatctaggatcatgtgtgtgctatgtaataaaatcatgagatcacttatgaaagactgtgtt

SEQ ID NO: 52701 - DNA, 447 bp, Gossypium hirsutum
  Clone ID: LIB3197-057-Q1-M1-E1
aaaattccctccctcctttcctttttgccaaccacctccctaaaatgacgaaaacaaccgtaatcctcttcttcttcctctacatcctctcatccgccacggcggagatcaaaactctgaccatcaagtccgactcccgcccgatgattctcttcgagaaatttggcttctcccacaccggtcacgtcaccatctccgtctcctccgttgccgtctcttcctcttccaacgcccccaacccctccccttccctgctcggattcttccttctatccgaagaatctctcctccaggtccttctcgagacccaacaaaattcccacttttgcgtgctcaactcccgctacatgcaacacctcttgaccttcagagaactcttaccgccttcccttttccgcttgaaccgctcttaccccgcttctttctccaatgaatactctctcttct

SEQ ID NO: 52702 - DNA, 434 bp, Gossypium hirsutum
  Clone ID: LIB3197-057-Q1-M1-E10
ccgatttgtaatcccttccaaaagaaaggattagctaatcggtcctcttctaccctccaagccgttgcagcatcttcttctttttttcatttttcttcccatttccttccaaccttctccctccttttcatgcttctatcctgaccagccctttaacaaaccctaacaatcctcaacaaccctcaacaaggccttcaattacgaatcgtatgaggtaacagagtaacagagagtagcagcaatggttcccaagttcgtgctactcctggtcatacaatgggttgtgttacctatgtcacgggagatggacctgatcaacctcagccaaggatggctttcacaggagatgctctgttgataaggggatgtgggaggacagattttcagatttttacattaccgaaagagacattgctatatccagctcatgacta

SEQ ID NO: 52703 - DNA, 435 bp, Gossypium hirsutum
  Clone ID: LIB3197-057-Q1-M1-E11
ggaaaactgtgactgaagtaactgatgacaagaaggttataaagaagatcttgaaggaaggagagggatatgagcgcccaaatgagggggctgctgtccaagtgaaattgattgggcaactgcaagatggtaccatattcttgaagaagggccacaatgaaggagaagaattgtttgagttcaagacagatgaagaacaagtcattgaaggtcttgatagagctgtgttgaatatgaaaaaaggcgaagtagcactgttgactattgcacctgagtatgcatttgggtcatccgagtcaaagcaggagttggctgtggtaccgccaaactctactgtttactatgaagttgagttggtatcatttgtcaaggaaaaagaatcatgggatctgaacacccaagaaaaaattgaagctgctggtaaaaagaaggaag

SEQ ID NO: 52704 - DNA, 441 bp, Gossypium hirsutum
  Clone ID: LIB3197-057-Q1-M1-E12
gtgatttaatgcacctcattaataaggaagaaaaaacagtctcaagtgatcacagaaaagttgactttgtagagcagcaatatgtggaagctggagatagctgaaggcaatggtccatggctgcttagcactaacaatttcgtcggcagacagatttggaagttcgacaatgaagcttccccagtatcaaatggacaaggagcccaaacccaatattttcatcccaatttcaactcacatcggcatcatgttagaccaagcagcgacggacttaagaattttcagctgattaaagaaaacaacgtagatttaagcattggaccagtgagatttgaagaagatgaagaagtgaaaaatgaaaaagtcgaaattgctttaaggaaagcatttcgattcctttcagctacccaagcttcggatggacattggccttcagaaaat

SEQ ID NO: 52705 - DNA, 371 bp, Gossypium hirsutum
  Clone ID: LIB3197-057-Q1-M1-E2
cggacgcgtgggcggacgcgtgggcgatgatgagtgcacccaaggcagccaaagccgccatcacgtgcagcgacgtggtgaaccacttgatcccgtgcttgtcctacgtacaaaacggcggtacacccgctgctgcatgctgcagtggggtaaaagcactctacggcgaggttcagacctccccggaccgccaaaacgtgtgcaagtgcatcaaatcggcggtgaacggaattccgtacaccagcaataacctcaatctcgcagccggcctacctgctaaatgtggtctccaactcccttacagcatcagcccctccactgactgcaacaaggtgcagtgaggttgatgatgatgatatggaaggagtgga

SEQ ID NO: 52706 - DNA, 410 bp, Gossypium hirsutum
  Clone ID: LIB3197-057-Q1-M1-E4
gaaaaaccaaaaaaatggcgaaaccccaacttttatttctattttccttttcccttctctgtctcatatctttttccgccgccgattcctccatcatagacgacttacgtctagccggttccagtttcccgtcggttcatgcaaagaagctgattagggagttgaatttgtttcctaaaggggaagtcaatgtcgttgacgaacatcgggtttcgttgccggagggtcccaaactggtggagaagcggttcaagttcccaactttggaagtgcccggtggagtttccgttgaggatttgggtcactatgctgggtattacaagcttcctaactctcatgatgccagaatgttctacttcttcttcgaatcacgcaatagcaaaaaggaccctgttgtaatctggttgact

SEQ ID NO: 52707 - DNA, 284 bp, Gossypium hirsutum
  Clone ID: LIB3197-057-Q1-M1-E5
gaaaaaccaaatataagtcgaaaccccaactgttatttctatgtgtgcttttaccttctctgtttcatatctttttccgtcgacgattcctccatcatagacgacttacgtctatccggttacagtttcccgtctgttcatgcaaataagctgattagggagttgaatttgtttgctaaaggggaatttattgtcatttacgatcattggttgttgttggcggtagggttcattactgactgtgtaatgatttaagattacagctttggaagtgcccggcggag

SEQ ID NO: 52708 - DNA, 443 bp, Gossypium hirsutum
  Clone ID: LIB3197-057-Q1-M1-E6
gtttaagggatttttttcattcgtttcttctcacgctcgattaccttacaaaaagagaaaatgaccaagtgttacccaactgtgagcgaggaataccagaagtcagttgaaaaggccaagaggaagctcagaggtctcatcgctgagaagaactgtgctccactcatgctccgtttagcgtggcactcagctggaacttttgatgttaagaccaagaccggaggtccattcggaaccatgaagcatcctgctgagctcgcacatgctgctaacaacggcctagatatcgccgtcagacttctcgagccgatcaaggagcagttccctaacctcacctacgctgacttctatcagcttgctggtgtcgttgccgttgagattactggtggacctgaaattcccttccatcccggaagagaggacaagcctcacccccctcctga

SEQ ID NO: 52709 - DNA, 399 bp, Gossypium hirsutum
  Clone ID: LIB3197-057-Q1-M1-E7
gtcaataagctttaaccgacaaaaaaaatggttgcggatcgtacgacgatcctagatgccgccatccttgtaacggctatttacggcggcgcggtgacatctgcgcacgcaccggcagctgatccagcgatggccatgtcgccgtccgccatggcaccgacaccggactgtatgacgaacttgctcaacttatcggattgatcgacgtacggggaggccggaagcaacttgacgaagccggacaagctttgctgtccggaattggctgggctaggggaaagtagccctcaatgcttgtgctatttgatggataaaaatgcgacggctaactatgggatcaacattgacatggacagagctcttaagctgcctaatgttagccatgtcaaaacccctgct

SEQ ID NO: 52710 - DNA, 244 bp, Gossypium hirsutum
  Clone ID: LIB3197-057-Q1-M1-E8
aacacgcgtccttacacttttccttttcattaaccatatgcttaataacaaactcaattaactatcccagtaactctaatcgaaaatcacctgttaatataccatatatttaagcgacgcgatcaacgagctgctcaatgactgactttgataaagccactgctttggttctgatagtgactctgcttgtgaatgttgctgctaagggtgatgatgatggtgatgatgatgtcaagatacatgt

SEQ ID NO: 52711 - DNA, 230 bp, Gossypium hirsutum
  Clone ID: LIB3197-057-Q1-M1-E9
gacggcatcatactatcatagcagttggttttctaatatgcttgaatactatcccattgaaacactgcagaaacactcatataaaaacaccttgtgacataattcaattttgacctagggaagcgtgattagctctgttaccgtcttactgatgaccgcagctgtgcctgctatcgtgactgtgaatgttaattttgctcgtcaggttgatgatgatagtaataatctat

SEQ ID NO: 52712 - DNA, 424 bp, Gossypium hirsutum
  Clone ID: LIB3197-057-Q1-M1-F10
gatcaaagactcaaaacacgtgccctccaaccatttttcctgtttcaccgatcaaagtcccaatccacctacaccgatcaaagtccctatcagaggatagaggtaaaatggtctacctacaatattctaacaggcaagagattgtaaacaacaaaacctcgggggatatagccggaaatgttcatttggtaacaatcaaaggtcaagatgcgtggcttgattccattgatgatatgaatctggtattttcagcttaaggatttgtgcataatattactacctttgagaagacagctggattttagtcagggatatatatattgaatgggaactgatgctattgaagcaggggagactccatttaactcctatcctagattctttgagattcgagaataccctaagaatgccatgtgcaacatca

SEQ ID NO: 52713 - DNA, 439 bp, Gossypium hirsutum
  Clone ID: LIB3197-057-Q1-M1-F11
gtctaatttcatttgagtaagaaagggacaaaaaaaatgccggcagtttacggagccagattgacgacgtttgaggattcagagaaagagagtgaattcggttatgttcgtaaggtgtcaggaccagtcgttgttgcagatggaatggctggtgctgccatgtatgaattagtccgtgttggtcatgacaatctgattggtgaaattattcggttggaaggagactctgctacaatccaagtttacgaagaaacggctggtctgatggtgaatgatccagttctgcggacacacaagcctctgtcagttgagttgggaccaggaatattgggaaatatttttgatggaattcagaggcctttgaaaactattgctaaaagatcaggtgatgtatatatccctcgtggagtctctgtcccggctctcgacaaagatactc

SEQ ID NO: 52714 - DNA, 410 bp, Gossypium hirsutum
  Clone ID: LIB3197-057-Q1-M1-F12
gtcttaataaacgccttctttcttcttcttcttattcctttattgctttttagaatttttcttaatcgaaaatgagagagtgcatttcgatccacatcggtcaggccggtatccaggtcggaaacgcttgctgggagctttactgtctcgagcatggaatccagcctgatggtcagatgccaagtgacaaaactgtcggaggaggtgatgatgcttttaacacctttttcagtgaaactggtgctgggaagcacgtccctcgtgccgtcttcgtggatcttgaacccactgttattgatgaagtgagaactggtgcttaccgccagctcttccacccagaacaactcatcagcggcaaggaagacgcagctaacaactttgcccgtggtcactacaccattggcaaggag

SEQ ID NO: 52715 - DNA, 427 bp, Gossypium hirsutum
  Clone ID: LIB3197-057-Q1-M1-F2
gatggcatcaaagcaatcatattggaggacttaaagaatgcaaagtcgattgtgaactggatagcttgggcagaaccacaatatgactttaatccaatgatagatgaatggtgcaaagaagcccctaaagagcttgattttgatcatgaagctgagaatactagaactgtggctgcaaatcttggctgcaaaaagtcacctggtgagagctactcttccaaccgcgtgaatgttttgattccagaagttattcagtcaaccaaaagtgtgctcatcttagagtacatggatggaattcgtctgaatgacactgcatctttggaagcttttggtattgacaaacaaaagataggtgaagaaataactcgtgcatatgcccaccaaatatatgttgatggattctttaatggtgatccccatcctggaa

SEQ ID NO: 52716 - DNA, 347 bp, Gossypium hirsutum
  Clone ID: LIB3197-057-Q1-M1-F3
ggagtgacaaatccataaacataaagagactctaacctgggactgcaccagatgactgctatggcctaagatataacacgagtttgcataattccgctgttcgaagaaaggagcacagaagcccctaaagaagctaaacataactcatgatgctgaaaatactagaactgtggctgcagatcccggctgcgcgcagacacatgatgagagctactcttccaaccacgtgaacggtttgactccagaaatgaaacagggaacacgatgagggctcatgtatacactcaatgggcggaataaccacgtatcacacatggatcgttgggaaggatgaggggactgaccca

SEQ ID NO: 52717 - DNA, 429 bp, Gossypium hirsutum
  Clone ID: LIB3197-057-Q1-M1-F4
cccacgcgtccggttttctctcatgggaactttactttcaagccatggtttctccttgttccttctttggaccttcactttatacggtctctgtttatccttctctccgatcgacaattacctcatcaacagcggtgcctccctcgattccgttgtagacaaccgtcgattcatctccgactcgtcgaattcacccgattcccatctctcttctggtcggaccttttcgctctgtgccggaactctccttcctggtctgcctcaaatctaccacaccgctagggtttttaattcgccgtcgaaatacgtcttcaatgtcaaagatccagggacgcacatggtacgtctccatttccatcgattcaattcatcgagattggatctgggtaactctcgatttcacgttttggttaatgggttagtagcttt

SEQ ID NO: 52718 - DNA, 348 bp, Gossypium hirsutum
  Clone ID: LIB3197-057-Q1-M1-F5
cgcagacccacgagtactgactcatgggaacagtactttgaagccgcgggccttagttgttcagggtatggacctttaatttaaacggtctgtgactatccaaaggctggagcgacaattaccatatcaacagcggagcctccctagattgcgaagtagacaaccggggattcatcttcaactcgttggaaccacccgagccccatctctgtgttggtcggaccttatagctatgagcctgcactctccttgctggaatgacaaagaggtgccaacccggttgatcttgttgtgcggccacgcaacccattgtcagtggagttgagaccaggactctcgggaaacatt

SEQ ID NO: 52719 - DNA, 456 bp, Gossypium hirsutum
  Clone ID: LIB3197-057-Q1-M1-F6
gggtaccaaggattaaattgaactattaaatttattattgttaattagcacgtatatccttttaggcgaaggaaatttagtaaataaagcagtgatctacaattaaagagaagggtgagaagaatctaacaagatatagaaaaccccaaaaaagaaaagaaagggggctataattaaggtgtaatcaagattgaatatgggaccattttgaaaagaaaaaaaagatcataattgagtatgataaggaatctttacctaattcaaagaaggctttgaaacatacgtaattttgaaatgtttagctactcctgttgatctataaattgggattttttggagcttgaaaaaatttatgtttaaattttattttatatttatataaagaagtaagtgtaattgggaagacagagggtgatggtgagcacagtatgaaataattaacaagaaaataaaagc

SEQ ID NO: 52720 - DNA, 284 bp, Gossypium hirsutum
  Clone ID: LIB3197-057-Q1-M1-F7
aaacaatcaatcaatagttagaaaagaaaagacaacagcggccgttttacttcaattcttctgccggcgactttgagtgacgatttctaggcggctgttggttttatcttccaagtgcggtttaaggcttcagtgtgtgcggagaatgggagggagtcggggttattcggcgaatcctagcgactacaagcttctagaagagattggttatggcgccagtgctactgtatatagagcgatctatcttccttttaacgacgttgtagctatcaagtgtttggatc

SEQ ID NO: 52721 - DNA, 71 bp, Gossypium hirsutum
  Clone ID: LIB3197-057-Q1-M1-F8
aaagtgtcatggttcatatctatacttaaaattttaattttgattcatggtccttatttaaggaaaggatt

SEQ ID NO: 52722 - DNA, 255 bp, Gossypium hirsutum
  Clone ID: LIB3197-057-Q1-M1-F9
acgaaagtgtcatgcttgatatcgatgcgtaacaataaaatctttatttagtagcacatatttaaaccaaaaaattcgttcgcctttttctatattagactggcatctgtctctatgtatccaattaatgcatatatatgggctgatctgagaatatagtgtctgtgatttgtgccaatttagctaaaactagcgcttagatagaataggataaggctctatatgtactgtaaatggatctacctattttcaata

SEQ ID NO: 52723 - DNA, 376 bp, Gossypium hirsutum
  unsure (1)..(376): unsure at all n locations; Clone ID: LIB3197-057-Q1-M1-G1
cattcaaataatgggttctttctttgaatttgttgtgatacaataagttttttttattgtaattgtattgaaacaaaaaaaatggataacaatggaatgaataagacaggaggcggtccgcaaattttcacttattctatttctatggttttatctgagaatttcgtgtcttttttttattccaatttttgctaatttcgtgttttgattgcctagtgcaattccatttttttattccgattgtatctacatattctaattttttgaggtaaggaggatgaataaggataaatgagaaggaattaaagaaatggggngaaagaagaaaagacaatttaaacagagaaagaaggggaaaaaaaaaaatatcgggggg

SEQ ID NO: 52724 - DNA, 434 bp, Gossypium hirsutum
  Clone ID: LIB3197-057-Q1-M1-G10
atttgttccccggaaaagttctcatttccacccaaatgcaaaaccccagatttctgttctcccttttgttttctatattgatctcaattctgttcttcaacaatataatcgctgaatcaaccttcggccctgaaacaatggcgacaaccactactttgggcggagtccacccttcccaaggctcccaaaacagcgtcgagctcgaaaacctagcacgctttgccgtcgacgagcacaacaagaaagaaaatgcaatggtggagtttgtgagggttgtgaaagcaagcgagcaagttgtggcggggacacttcaccatttgacggtggaagctgtcgacgccggcaaaaagaagctttatgaagccaaagtttgggttaaaccttggatgaattttaaagaattgcaggagtttaaacatgctggtgatgctgat

SEQ ID NO: 52725 - DNA, 439 bp, Gossypium hirsutum
  Clone ID: LIB3197-057-Q1-M1-G11
cggacgcgtgggaaaaaaaatttctctggaaacaaagcaactatcaactacgtttacctcagatctaaaacacctcgtctcagatccactaaattcaccatgtctactactttcagcggcgatgaaacggctcccttcttcggcttcctcggcgccgccgccgctctcgtcttctcctgtatgggagctgcatacgggacggctaagagcggtgtgggtgtggcttcaatgggtgtgatgaggcctgagttggtgatgaaatccattgttccagttgttatggctggtgttttgggtatttatgggttgattattgctgttattattagtactggcatcaatccaaaggccaaatcgtattatctttttgatggttatgcccatctttcctctggtcttgcttggggacttgctgggctttcagctggaatggcaatcg

SEQ ID NO: 52726 - DNA, 270 bp, Gossypium hirsutum
  Clone ID: LIB3197-057-Q1-M1-G12
acgatgaagcgtgggaaaaaaaaattatttggacacagaggagatatcaactacgattaccttacatctaaaacacctggtctcacatccactaaatttaccatgtgtactactttcagcggagatgaaacggctctcttcttggggttactcggtgccgacgacgatctcgatcttctcctgaatgggagctgaatacgggacgcttaatagcggagagggtgttgctttaatgtgagcgatgaggactgacttggagatgaaatgtat

SEQ ID NO: 52727 - DNA, 355 bp, Gossypium hirsutum
  Clone ID: LIB3197-057-Q1-M1-G2
cggacgcgtgggggctgctcttcccaaatgcttacatgcacgctcaagctcaacattcaccaaggtcgacaacacctgcaacagcagcaagtgcatattatgttcaacgacaacagcacactctacctctgggtacatcaacaacttcatcaacttcgatgatatcgttgcgttctccggttactcttgccaacagcggcaccaccgaccctgcaaaagctgtagcagctgctgtggcaagcaacatgaaaggtgggttggcatcccaagacttatcaatcctgcacaatttgcttctccacgatccactggaaagtcacatcagctggtaccacgcttcccatgtgttcatgct

SEQ ID NO: 52728 - DNA, 406 bp, Gossypium hirsutum
  Clone ID: LIB3197-057-Q1-M1-G3
gcgagcgaaccgggaaaagcccagcttgagaatcggtcgccatcggcgtccgaattgtagtctggagaagcgtcctcagcgacggaccgggcccaagtcccctggaaaggggcgccggagagggtgagagccccgtcgtgcccggaccctgtcgcaccaagaggcgctgtctacgagtcgggttgtttgggaatgcagccctaatcgggcggtaaattccgtccaaggctaaatacgggcgagagaccgatagcgaacaagtaccgcgagggaaagatgaaaaggactttgaaaagagagtcaaagagtgcttgaaattgtcgggagggaagcggatgggggccggcgatgcgccccggtcggatgtggaacggcgagagccggtccgccgatcggcttcgggcgt

SEQ ID NO: 52729 - DNA, 435 bp, Gossypium hirsutum
  Clone ID: LIB3197-057-Q1-M1-G4
tcttgagcattttccctagtaaaagtttctggcacttgcatggtgggtttcctggatgaattataatcgttacagctaggggaggtggtgtgatggcggccaagaaggcgtgtgagtctttttccaagagcttaattgaggatgtgcataaatggggttgcatgaagcagacaggggtgagcttgaggcacatgatggagtttgggtccaaacccactgaccggaacttgttgatttcgggtcagttcctccacaaggagctccccattaggattgctcgtagagccattgagcttgataccctcccttatggcctttctgaaaagcctgctactttgaaggtccgagactggtacttggattccttccgtgacctaaagtctttccctgagatcaaagatataaatgatgagaaggaatttacacaaatgatca

SEQ ID NO: 52730 - DNA, 401 bp, Gossypium hirsutum
  Clone ID: LIB3197-057-Q1-M1-G5
gcttacgagaaaagagaagaaaacaatgtcaggtcctcagtgctgttcgaatccaccaacattggattctgcaagtggggctggtcacgttgagaatcttgctggtctcaacacttatgtttctgggtctcttcaatctaagcttgctgtttttcttatctctgatattttcggatatgaggctccaaactttagaaagctcgcggacaaggttgcagccgctgggttctatgtggtggctcctgacttcttttatggagaaccctatgaccctaataaccctgatagacctctatctgtttggataaaggatcatggaccggataaaggttactaggatgcaaagctcgtaattgacgctttgaaaagtaaaggggtttcatccattggagctgctgggt

SEQ ID NO: 52731 - DNA, 431 bp, Gossypium hirsutum
  Clone ID: LIB3197-057-Q1-M1-G6
gaaatccctaaaacccaataactcgaaaagcaaccctaattacgatgtcggatcagaaaaacgacgccggaacttctcaggcgaatgctccggcgaatgatccaaagaagaaagaggaccaaaagaagaaagatgatgaggatctgtcggaggaggatttggctttgaaacaacagttggagttatatgtagagagagttcaggattccgatcctgggttacagaaagtagctcttgagagcatgaggcatgaaatccggacttcaacaagctctatgacttctgttccgaagccattgaagtttctccgtcctcattatggaaccctaaaagctttttacgagacaatgccagaatctgatttaaagaaatacttggccgatatcctgtctgtgttggcactgaccatgtctgcaaagggagagcgggag

SEQ ID NO: 52732 - DNA, 358 bp, Gossypium hirsutum
  Clone ID: LIB3197-057-Q1-M1-G7
ctagaacagcctatccgagtcaggctttcggctttcggcaaacctcggggaatatttcatcggcccagagctcgagcaattgatccaatagttagccgaaaatgatccgaaccggtacgggaccccaccagcatcgaagtcggccatcgattcgctaccatcggtgaagataacaaaggatcacttgagttcaaagtccaagcagtgcgcagtttgcatggatgatttcgaggaagggattcaagcgaagcggatgccctgcaggcatctttatcataagaattgcatattgccgtggctggagcttcataattcgtgccctgtgtgccgtcacgagttgcctacggatgaccctgat

SEQ ID NO: 52733 - DNA, 335 bp, Gossypium hirsutum
  Clone ID: LIB3197-057-Q1-M1-G9
gtccttcgtccgaaatgagcaaccctgattcggcgcttgctaccagattgccttgtccatcaccgatgagctcgcggatcttgagcaggctggtgtcgatggtatcccaatccatcacggtgctttgccagaatggttgcctctcatgaagtccgtgcatgccttctaccaaacgatggatgagcactgcttaaggatcacgcactgtggcgttcactacattaagcagatgcagacggccctaggctactacaagtacaagggtgctgtgcactctatcaaacacatggttgccgccctcgtaacccattgcgactgccctatatatgagaaag

SEQ ID NO: 52734 - DNA, 377 bp, Gossypium hirsutum
  Clone ID: LIB3197-057-Q1-M1-H1
tgcaatttctcatccaccaattgaatcaggttgtgaagtattgagggtgtttattatttgttgtttttttataattactgatgtctccgccgctgcttggcgtggaggaggaagggattcagagcaatgttactttactcggttcttcaggctcaatggaaagtgtgtgccagaatagtgctgacttgaaggaacggaactacatgggcttgtctgattgttcttcagtggatagctctgttttttcccctccgtccgaggaaagaaaggctagtttgaatctaaaggcgactgagcttaggctcggactttctggattgcagtcgcctgaaagaaatccagagctttgcttgttaagttcttctcagcttgatgag

SEQ ID NO: 52735 - DNA, 429 bp, Gossypium hirsutum
  Clone ID: LIB3197-057-Q1-M1-H10
cccacgcgtccgcttgggctgtcccttggtgggtgtttctttaggttttcttggtcgcgacgattttcagtggcttgtaaatggcagcgtataggctcctgattttctccctctttttggccctagttttcaccaggattggagccgatgcctcaactgaaccgctgcttgaatcggacgccgccgattcttctgctcttaagatggagttggatcaactgaagtctaagatccgtcttcttgaatcaaatgttgaggagaaaattcgagaattgaaaaccaaggatgagatgataaagcagaaagataaaattatagaagaaaaatctgacaccatggcatcgttgcactctgaattatcatctcttcagaaaaaaggaaccccagatgctgaagaacgggtgggaaaagctcatgcgaaagctcttg

SEQ ID NO: 52736 - DNA, 380 bp, Gossypium hirsutum
  Clone ID: LIB3197-057-Q1-M1-H11
catagccatggcttcctcaccaaaactcttctctatgtctatcctcttcctttttgccctcttctccatgcaaatccatgctagagagtacttcagcaaattcccaagagttaacatcaatgagaaagagacaacaaccagagagcaaaagcacgagaccttcgttccccagaccacccaaaagccagaagaacaagagccaaggttcattcctgaaacccaaaatggttatggcctttacggccacgagtcaggctcaagccggcccagtttcaccaccaaagaaacctatgaaccctatgtcacccctgttagattccaccctgatgagccctataacagcattcccgaatccttcaacaataaagacacttactact

SEQ ID NO: 52737 - DNA, 419 bp, Gossypium hirsutum
  Clone ID: LIB3197-057-Q1-M1-H12
ctttttcttcttctcgtcgtcgttgttgtttcgatttttggtcctttcttcgtcttcaacttttttacccctttttttgtttgctaaatcttttgctcgtcttcttcgtcttgttcttcttgtttgcaggaggctttaaatgaatttataaaattaaagcatctcgatcagtcgttttctaaatttccgtctactctttttttagtaatatgtttcagttatcgctggtactttgagggttgactgtttcttgaatggttattttggctacgagcttcgattcagcttaagcaatccgggatccgagtaattgcatgtctagtgtttgctagcagctcgaattcgaaggtggttcattttccgcaactaaataaaacgtgtagagattgtgccatcaaatgagtgtcaagagtttgggc

SEQ ID NO: 52738 - DNA, 246 bp, Gossypium hirsutum
  unsure (1)..(246): unsure at all n locations; Clone ID: LIB3197-057-Q1-M1-H2
cggacgcgtgggtnacttaacaaacaactcaactgaatcgtgaaggcagtcgagtctgggcccatacttcaacaggacccggagcaaaaaagcgcatgctagtactagtctcgctccaaaataagaaggggggaggtgttggagctccaaagattccgtagaaagtctagcccaagccatctcctttaatggaggatgcctaataagataacctgggcgagatatttttacaaagcaaattataaa

SEQ ID NO: 52739 - DNA, 308 bp, Gossypium hirsutum
  Clone ID: LIB3197-057-Q1-M1-H3
ctggacagtgaggccttgaatgacatctgtttccgcacacttaagctaaccactcccagctttggtgatttgaaccatttgatatctgcaacattgtctggagttacatgctgcttgcgattacctggtcagctcaactccgatctcaggaaacttgccgtgaatctcatcccctttcctcgtcttcactttttcatggtgggttttgctccactcacttctatggggtctcaacagtaccgagctctaacagtacctgagctcacccagcaaatgtgggacgcaaagaaccaatgagtgtgcttctg

SEQ ID NO: 52740 - DNA, 367 bp, Gossypium hirsutum
  Clone ID: LIB3197-057-Q1-M1-H4
ctattcttttcaacagatcccacagtcatgtaataatctgagccgagtgtttgaggcctgaaaacgaaccctaaaccatgggtcagggaacaccgggcggaatgaataggcaaggtttcccaggggaccggaaacccgatggctctgattagaaggataagaaatttgagccagttgcgcccccagccagggtggggcgcaagcaacgaaaacagaaaggacctgacgccgcgggtcggctttcgactgttacgccgctgacgaagagtaaactgcggctgataaagctggagcgggtcaaggattatttactgactgaagaatagactgtggctaaccaggaaagggtcatgcctaatgaagagaa

SEQ ID NO: 52741 - DNA, 411 bp, Gossypium hirsutum
  Clone ID: LIB3197-057-Q1-M1-H5
cggacgcgtgggcctcactcggcccggttggactcgacaagatgcttgttgatgacattggtgatgtaacgattactaatgatggtgctacgatcctgaagatgttggaagtagagcattcagctgccaaggtacttgtagagttggctgagcttcaagatcgggaagttggtgatggaacaacctctgttgttattgtggcggcagaatttctcaagagagcaaacgatctggttaggaataaaattcacccaacatctataattagcggcttcagactagcaatgagggaagcatgcaaatatgtagaagaaaagttggccgtgaaagttgagaagcttgggaaagattctctagtaaactgtgccaagacgagtatgtcctcaaagctcataactggtgacagtgact

SEQ ID NO: 52742 - DNA, 350 bp, Gossypium hirsutum
  Clone ID: LIB3197-057-Q1-M1-H6
gccccacacatttcctgctaaatgctgagaactaccattggcagtggacattattttcctttgctgcctcaactgcaatctatgtctatttgtactccgtctactactaccatgtgaaaaccaagatgtcaggcttattccagaccagcttctacttcggctatactttgatgttttgtcttgcatcgggaattctctgtggagccgctggatatctcaggtctaatctcgatgtaaggaggatctacagaaacatcacttgctactaaatgcttataatgtttgaaagtataaccatcaccgcttctgtgagcatttttatttgtcgtctgaggcaataaatgatgatg

SEQ ID NO: 52743 - DNA, 300 bp, Gossypium hirsutum
  Clone ID: LIB3197-057-Q1-M1-H7
cggacgcgtggggcagtttctgatttttcgaggacatactcggcttgttcctcaaggagggttagctgagttttctgatgccattctgaatgcgaagcgtcttgacctttttaacttgtatagagaggtggtgtccataggaggctttaatgtctggaatggcataaattggaaaggacaagtattttcgaagatgcgcaatcacacattgacgaatagaatgactggggtgggccacactctgaaaagacattacgagacttaccttttaaagtatgaattggctcacgaccatttgga

SEQ ID NO: 52744 - DNA, 316 bp, Gossypium hirsutum
  Clone ID: LIB3197-057-Q1-M1-H8
aaaaaagaaaaaatgatgcttggagaaactcatcgtccaaatccaaccgtccacgtaccaccttggcctgatcttgacgatgatcagacggatgtagtttactctcctatccattacaatgcaaccgacaacaacttgagcagtaacggcaacccgttttacctccatgaagcgttatcagctttacaacgttatttgccatcgaacggcccggatgttgagttggattccgagtttccgggtttggatagtccggattcaccggtcgatgcttattcctgtggacattttaagatgtacgaagtcaaaattccga

SEQ ID NO: 52745 - DNA, 265 bp, Gossypium hirsutum
  Clone ID: LIB3197-057-Q1-M1-H9
aagaaaaggaaaatctttctttcttcaacgttttgctggaactgggctcaacttttcgggttttttattaactatgggatcttttttgttgggttaggctctctattgttctatttctcttatgagtcactctggatttctcatggtgatcccgttttgcctcaattaggcgaatatctcttttcttgagattttggcgtttacggcttggtaattaaggacgacgtcgctcaatcacaatgagagagaggaagaccaccgacct

SEQ ID NO: 52746 - DNA, 390 bp, Gossypium hirsutum
  unsure (1)..(390): unsure at all n locations; Clone ID: LIB3197-058-Q1-M1-B1
attggaaatggatggaaaacaaatcccagataatgaaaacgttgaaaaaaatgaattagagcaattattaccatctccagaggagttggcatatcaaattgaagcagaactctttaaattatttggaggtgtgaataaaaagtataaggagaagggtaggtctctattgtttaatttaaaggatcgtaacaaccctgaactcanggaaagagttgtgtctggcgaaattcccccagagcgattatgttcaatgagtgctgaggagctggcttctaaagagctttcacagtggcgacaagccaaagctgaagaacttgctcaaatggtaattttgccctgtggtaaagttgatattagacggcctggtgaggaaaacacataagggtgaat

SEQ ID NO: 52747 - DNA, 430 bp, Gossypium hirsutum
  unsure (1)..(430): unsure at all n locations; Clone ID: LIB3197-058-Q1-M1-B2
gtctttgtactgaagtcctccttcgatcttagcctaaagccgaggacagtgttacaagtctctcgtcaacagcaatggaggcttggatcagagctagagtaaccttagctctcactttattcgctcttttattcttcgtctccagatcttctcctccacgtcaatttgtaatctccaacgccgagcgtagaattgacttgagctcccacattattaatgttcacttgactttgaaggtcgagaatactggtactagacctgcttcagaagttgttcttgctttgacccccactgaagttgaccatctagcaatggttgatgcattagcaattaaaggaaagcggaagaagactacttcagttcatcttgagtaaaaccaactgaactgcctgatgcaccacctattgacgcntaaatatttactatttat

SEQ ID NO: 52748 - DNA, 419 bp, Gossypium hirsutum
  Clone ID: LIB3197-058-Q1-M1-B3
attgataaaaaaaatataaacattgtagaattaaatttattattatgctaataaaacgtcacggcaatattctgttagtaatttaacggataaataaataaaatatttaattttaataacattaataattaaaatagatttttttaaaaatttaggtgagtacgacaataactgaattactatttatagtttacattctattcagctattgactgaagtccaaagattatttagacgataagtttataaatagcataagtcaattttgggggaagaaatataaaaacaaccttcaccaaaacatgggtgtctttctttcttgcttctctttttaaatgatcagtaaaaaaactaggtttgttatttgaaaattttggttgatttggatggaaatattgatccttatatgattaaaaata

SEQ ID NO: 52749 - DNA, 433 bp, Gossypium hirsutum
  Clone ID: LIB3197-058-Q1-M1-B7
aaattaaaagaaacatttaattaattcatattatataaaaaaatatttatacataatttaatttagagcttttatttataaaagacttacacataatatatttgaccattgcatgccagggtcttagtacaggataaaaaaacttatttagtactggatgccaacgttgtcctagtactatattagaatcaacacaaacatttagtactagatgatgtaacacctcaaaaatcattacattatgaaagtagtgaaaaattgagaatttgtccttgataaagagagataaggaaataacagtgacaaaaagagaaagttgagtaatgttaaagaaaattttaattaagaagtatgttgaaatacattaatttaaagtaaggactaaatcataaatgtgagaaaagtgtgggttcaagcataaatattcaattag

SEQ ID NO: 52750 - DNA, 424 bp, Gossypium hirsutum
  unsure (1)..(424): unsure at all n locations; Clone ID: LIB3197-058-Q1-M1-B8
caacaaaacccctagaattaaggcctaaaccttccctcacattaaccgagttaccatgtttgacacctgcccaattttcttcactgcacgacgacccatccactgtccgtaaccaccatgctccgacacctagccaccgcacgcaacgataaatcccatccaacgactatttttgaggaatcaatagttagccgaagaggacagtagctctccccatgccccaactttccataaataaaacaaaacaaacttaacttctcgtatttgaaccgagcataaacaaccatagacttcccaaccataactttctttttgcgcttcaatggggcagcaacatttaaacaaacacgaatatgtaaataattttgaatccgcaaagtcgaaatggatgtatcatactcaagaaactttccacanaaatcac

SEQ ID NO: 52751 - DNA, 441 bp, Gossypium hirsutum
  Clone ID: LIB3197-058-Q1-M1-B9
cccacgcgtccgcggacgcgtgggcaaagccgcaaaggaaaacaaaacaaggggcgaaaccttaattccatcaaaataattcaaaggaaaatatctgcagaatcataatggagaattatctctttctgttctcgcttgttcttctctttggtcttttacccttttcctctcaaaccccaaaccctaaaaaccccaatcccaaacctccgctcacccaggcacacaccgagcttataaactatggttttccgatcggtcttcttccggcctcggtgacgaagtacactcttaaccaaacatccggtaacttcgccattgatctcggtggcacgtgcaagatcacgctcccgcctgacaactacctggctacttactcgaaacgggtaacgggaaagattgaaaacggaaagatagcggaactcgatgggatcagggtacggg

SEQ ID NO: 52752 - DNA, 419 bp, Gossypium hirsutum
  Clone ID: LIB3197-058-Q1-M1-C1
gatggcatcaaagcaatcatattggaggacttaaagaatgcaaagtcgattgtgaactggatagcttgggcagaaccacaatatgactttaatccaatgatagatgaatggtgcaaagaagcccctaaagagcttgattttgatcatgaagctgagaatactagaactgtggctgcaaatcttggctgcaaaaagtcacctggtgagagctactcttccaaccgcgtgaatgttttgattccagaagttattcagtcaaccaaaagtgtcctcatcttagagtacatggatggaattcgtctgaatgacactgcatctttggaagcttttggtattgacaaacaaaaaatagttgaagaaatacctcgtgcatatgcccaccaaatatatgttgatggattttttaattgggatcccca

SEQ ID NO: 52753 - DNA, 427 bp, Gossypium hirsutum
  Clone ID: LIB3197-058-Q1-M1-C2
cttttaagtgctactcaaaagatcatttttcattggctggaaaatagatgatgggtgcaaagatctgacagtggatgatgcagctgacttattcttatcaactgctgctttggcaaaagcattgatagttgcggagcccatcatctattttccagccaatgaaaaatgatcttttaagtgctactcaaaaagtagcacttgacaaggctgatgatgtaactactacagcagaactggctcaagctagaggcattcaccacgaactgcaaatgctacattactcaaaccatggtgatgcacatcaccatcttactcatggtatgcaaaagcagcagcagcggcagccaccagaacatgatgattcatctttgaaaaaattggctgcagatgctgctctgagtggatcatcaaattgcatgggtgggct

SEQ ID NO: 52754 - DNA, 428 bp, Gossypium hirsutum
  Clone ID: LIB3197-058-Q1-M1-C3
gatggcatcgaaacaatcatattgaatgacttaaagaatgcaaagtcgattgcgaactggatagcttgggcagaaccacaatatgactttaatccaatgatagatgaatggtgcaaacaaacccctaaagagcttgattttgatcatgaagctgaaaatactagaactgcggctgcaaatcttggctgcaaaaagtcacctggtgagagctactcttacaaccgcgtgaatgttttgattccagaagttattcagtcaaccaaaagtgtcctcatgttacagtacatggatggaattcgtctgaatgacactgcatctttggaagcttttggtattgacaaacaaaagatagttgaagaaataactcgtgcatatgcccaccaaatatatgttgatggattttgtaatggtgatccccatgctggaaa

SEQ ID NO: 52755 - DNA, 421 bp, Gossypium hirsutum
  Clone ID: LIB3197-058-Q1-M1-C7
ggagatgtcttcccgggatccaccttatccgaccatattttgagatttaacaacattccacaggtcaagatgatggttgtccttggagaacttggtggaagagatgagtattccttagttgaagccctgaaacagggaaaagtgaacaagccagtggttgcttgggtcagtggaacttgtgcacgcctcttcaaatcagaagtacagtttggtcatgctggagctaagagtggtggtgagatggagtctgcacagggaaagaatcaagcgctaaaggaagctggagctgttgttcccacttcatatgaagctctggaagctacaatcaaggaaacatttgagaaactggttgaagaaaggaagattacaccggtcaaggaagttaagcctccacaaatcccgagagatcttaacagtgcta

SEQ ID NO: 52756 - DNA, 427 bp, Gossypium hirsutum
  Clone ID: LIB3197-058-Q1-M1-C8
aaagaacactgttagtttgagtatacatactgttgagttgtctttgatgcaatcttttttttcctcattttgatacttgtgcactatgatattcaactagtctttggtgtatcttccaaagctaagtcattattctttattaagaaaagctcactttagatcttggaaattctactgaaaagcaagttattcttcatataatatttcctttcttatttttctgcgtttctttgtgcctcctagactggaataagttacccttcctttcacgcttcccatttttattatctgcatttgttcgtagcatcatctttaaccttttgtcaatagtggatgtctgccttctagaatgaaatttgttcctcgtcttataaagggacccaattatggtccggcagtaccagcattcaataattctgatctcaat

SEQ ID NO: 52757 - DNA, 395 bp, Gossypium hirsutum
  Clone ID: LIB3197-058-Q1-M1-C9
gtgggttctccacccactctgtcctctgggggacttgatcttgatttgaatagagttgatgagcctgctgatttgggtaatcactcaactgggtatagtcgtagactggatgtccctatgcagcctataaaatcattgtctgggattcttaatagtgaagtaaccgtccatagggacttcgatttgaataatggtcctgctgttgatgaggtaagcactgaaccatcactatttagccataatgctagaagcagaaatgccccatctcaaccatcagcttccagcctccggatgaacagtactgaggtggcaaatttctcatcatggtttcctactgagaatacatactcatctattgcactacaatcgatcttacctgatagagagcagccttt

SEQ ID NO: 52758 - DNA, 360 bp, Gossypium hirsutum
  unsure (1)..(360): unsure at all n locations; Clone ID: LIB3197-058-Q1-M1-D1
aagatttgtattgaagtcttggagctatgtgtcaaatgcaatactcacctttcagaaggccagtttttcttggcattgaaaactgtagatttgattgacacaaactacttgcagaatatccctgtaaatacaatcaaaataatgatagggaagaatattcctataataaaagctcatatcgaaaagaaagtgactgcagactttaacgagtggcttcttcacattaggagttctgccaaggatattgggcagactgcaataggtcatgctgcatcggtacgccagagagatgaagagatgcttgaacggcagagaaaagccgaggagctgaacgtttctggcttaangagatgtggtata

SEQ ID NO: 52759 - DNA, 412 bp, Gossypium hirsutum
  unsure (1)..(412): unsure at all n locations; Clone ID: LIB3197-058-Q1-M1-D2
caagatgatgcttttctatagtaaacaaagcacgtcaattcgaggggctaatgttatatataggcgtgtcctttcccaagttgataaacctgctatttatgaagtatttagcttggagaagacattcaggatgacgttttcactgcttgtacttcatatgtggctctgcttacgccggttgaaagctgaaggaaaagatggtgttgaattaggacaatacgtctatgagatttataatcatgatgttgagctcagagtatctaaagctggggttaacttacttttgacgaaatggatgaaagaattggagaagatattctatggaaatattggtgcttatgatgctgncttgcttccggaggctacacacgaggagctaacagaggttatatggaggaatatcttttctgat

SEQ ID NO: 52760 - DNA, 420 bp, Gossypium hirsutum
  Clone ID: LIB3197-058-Q1-M1-D3
gcaacacatccccctttcgactacagtatcagagacgattacttctctcataagcctttgccatttttaatatatatatttctctttgggaaactacaactacagctatttcatcttctaaagcacactttcctttctctgtttcaacatttcctactctattaatcttacccaccttgcttacacacacacatatattgttgcttaggtgaaggaagtagttggaagtttaagaagatgagtgcttcaaagttcattaaatgtgttacagttggagatggagctgttggaaaaacatgtatgctcatttgttacaccagcaacaagttccccactgattatataccaacagtgtttgacaatttcagtgccaatgtggctgtagatgggagcattggtaaattgggtttatgggacact

SEQ ID NO: 52761 - DNA, 362 bp, Gossypium hirsutum
  Clone ID: LIB3197-058-Q1-M1-D7
aattctcaatttgattaaagcatagaacaaattgcagaatatgacctcagcaataattctaattaaaaggtgaatttttttcgacaaaaaatgtttttgtacatgcagtacttttttgtgctttctctccgagaaaaagatgagatgaggtgaggtgaggtgaggtgaggtgtgcaaccgtagtgccagagatacgggaaaacaagaagaaggcggtttcggctggctggctgctgagacttgagagagagagagagaggactaaacaacagaatagaagaaaagagcttgcattttcctgcattatttacacacatttgctctgaaattttagtgtgatcaaagtgatagtgttaaacgtg

SEQ ID NO: 52762 - DNA, 409 bp, Gossypium hirsutum
  unsure (1)..(409): unsure at all n locations; Clone ID: LIB3197-058-Q1-M1-D8
aaagaatcaccccatgggatcaaagagcaagaatctggttctgggttttgttgtcttagctgtattcttgatttcaggtgtaaaatcttggactggtgagattcacggtagagtagtctgtgatgtttgcgctgattcttccattggtcctgaagatcatattttagaaggtgctgacgttgctgtactttgtattacaaaatctggtgaagtagtaaattaccaggctttcacaaacgccaaggggatatacaccgtggccgaaacaatgcctgagagtgaccgttggaatacatgcttggcacgaccgatcagtagtttccatgatcactgcaaccatcttggggatcgcagcaccggtatcaagttcacctatactcgcccatcangtcatttgcacactgtcaga

SEQ ID NO: 52763 - DNA, 421 bp, Gossypium hirsutum
  Clone ID: LIB3197-058-Q1-M1-D9
ctcctcagtactttgaaagaaaattttgtgccacaagttcttatccagaagatatttactcaaacattttcgtacataaatgtacaattgtttaatagccttcttttacgccgtgagtgttgtacgtttagcaacggagaatatgttaaagctgggttagcggagttagagctctggagttgccaagtgaaagaagagtatgcagggtcgtcatgggatgaacttaagcacattagacaggctgttggttttttggttatacatcagaagtacagaatttcatatgatgacattgcaaatgatctctgccctattcttagtgtccagcaattgtacagaatatgtaccctgtattgggacgataactataatactcgaagtgtttctccagatgttatttccaacatgagggtattaatga

SEQ ID NO: 52764 - DNA, 318 bp, Gossypium hirsutum
  unsure (1)..(318): unsure at all n locations; Clone ID: LIB3197-058-Q1-M1-E1
cggacgcgtgggcgtcagcgtcagcgtcagcgtcggagaagaagcagaagcagacgcaggcgatccgnctgggtcttctccatctaaaccttctgatcaaccctcgattcatcggaggaatataccaaatggatcgcctgcatgatattctgaaagctcatcggcgcctgcgcttgcacgttcatccccatcataacaaaactcctggttcgtccgaagctttcaaggccgtttccaaagcgcttccttgcctaaactatgattaaaataagaaaaactacgatttatttggttcattgaacatgattattaaactat

SEQ ID NO: 52765 - DNA, 228 bp, Gossypium hirsutum
  Clone ID: LIB3197-058-Q1-M1-E2
gtcgacatagtgaacatagtggtgtttcagaggatgtgagtgtgagtgtgagtgagaatgagtttgtaaaatggttaccagatcgatttggattgcagaatgggagtgaggattcaagtaattttgattgtgaacattcatctgatttgggggaagttgaaagggaaagggtaagacaaatatttcacgagtggatgaacagtggtggaaagggatgtacatctaatg

SEQ ID NO: 52766 - DNA, 61 bp, Gossypium hirsutum
  Clone ID: LIB3197-058-Q1-M1-E3
cacttgccaaggcattggctggtcagaaagatgaggccttcttcactgccaacgcatctgc

SEQ ID NO: 52767 - DNA, 211 bp, Gossypium hirsutum
  Clone ID: LIB3197-058-Q1-M1-E7
cggacgcgtgggggtatccactactccagatggaaaagtgatggacctctttttcatcactgataccaaggaacttcttcatacaaaaaaaccgcaagggggaaccattctttacttggaaaccggacttaggtgtataatggaaaggtgggaaaatgaattaacttgccaaggaattactggttggtcacaaagaacatcggttctttct

SEQ ID NO: 52768 - DNA, 420 bp, Gossypium hirsutum
  Clone ID: LIB3197-058-Q1-M1-E8
gaaaaatgtctgcagtagttggtggatggatgggcgaggtagcagcaaagcttaaagagaaagttgaagcaagaaaaccattcttgtcaataagggccaagaaagaccaaccgtttccgaccaaagaagggcatgttgaagacaaagatgcttctaaagatgatactaacgaaaccacaatgtctgaagctactgtctgtctgcttatggatcggtttgtaccttggtaatgataaattagagaaagttcccttgtcctaactttgttgggccttatatgtaaaggcaactctatgctttgtgtaaattagagttgttttattgaggatatggcagccagctctgcttttaatgttcatttcttttgtatctgaacgctgtatatgattaactggtctctttaaacatatccagtaatac

SEQ ID NO: 52769 - DNA, 377 bp, Gossypium hirsutum
  Clone ID: LIB3197-058-Q1-M1-E9
cggacgcgtgggtttgtttctaaggatttaatctccaaaccttcttcccatttcttcattacattgttcaagaaaaaagaagcaaaaaaacatggccaaagttctgttgttcattgcactatgtgtgcttccagctttggttagtgctacacgcattctgaataatcaattggtggtagaaggctatgtgtactgtgatacttgccgggctggttttgaaacccctaagactagaagcctagctgatgccatggttaggttggtatgctccgacaggaagaagcggccaagttgtcttcaaaaaggagggatacaccgacaaaaccggaaaataccagattcgtgtatccgaagatcacttggatcagatctgtgat

SEQ ID NO: 52770 - DNA, 423 bp, Gossypium hirsutum
  Clone ID: LIB3197-058-Q1-M1-F1
aacgccttctttcttcttcttcttattcctttattgctttttagaatttttcttaatcgaaaatgagagagtgcatttcgatccacatcggtcaggccggtatccaggtcggaaacgcttgctgggagctttactgtctcgagcatggaatccagcctgatggtcagatgccaagtgacaaaactgtcggaggaggtgatgatgcttttaacacctttttcagtgaaactggtgctgggaagcacgtccctcgtgccgtcttcgtggatcttgaacccactgttattgatgaagtgagaactggtgcttaccgccagctcttccacccaggaacaactcatcagcggcaaggaagacgcagctaacaactttgccctggtcactacaccattggcaaggagattgtcgacctctgtttggacc

SEQ ID NO: 52771 - DNA, 387 bp, Gossypium hirsutum
  Clone ID: LIB3197-058-Q1-M1-F2
gaactatcaggtatacctcttccccttttgtaagtgcatcttttgcgagagtatgagcttggccattttctgttctttgaataaatctgaaagcaattttctggaaatgagatctattactctgaatatcatgaataatcatcccgataacagatttgtcccttgttgttgattgacatttgtgaataactgttttcggatcccccataatcgtgactgagtctatccccatgctgatacctaacttggttgcctccaaacatgcatatgcttcggcaacaaatggagatgaaatgttgaagtgcaaagttgactttaagggctctaatcacaccatcttgatcccgaacaataattcctgacgctgattctaaagttcctgatatc

SEQ ID NO: 52772 - DNA, 342 bp, Gossypium hirsutum
  Clone ID: LIB3197-058-Q1-M1-F3
acgggaaggattccctatcaactcaagagtttaatggaactgatgaatggcaggaagcaactcgatcttctgaattttttagaactgataagtcaagaatgggtttcaagcagacaaacaatgaggaagttttggtccagtgtacgaaatctcatgagcttcggcataaagccaaaaaggcgagcatcagagaattggagcatcaactaaaaagtggtatgaaagtagaagctgtcagggaagaccatgaactagagaaagctgagaaagatatgaaaacagctaaagaaagtcatggaagaggggagtttccttgcaataacgaaaccagctaaagaagct

SEQ ID NO: 52773 - DNA, 395 bp, Gossypium hirsutum
  Clone ID: LIB3197-058-Q1-M1-F7
acaaaggttacagaaagaaagaaaacatgtctcttgtgacagaagagataaaagcgagtgcatcagagatttaccatggagatgagatatgccaggagaaatccaagtttttgttggaggaagtaggcatgccaagggggcttttgccacttagagacatcgaagaatgtgggtacgtgaaggacacaggtttcgtgtggctcaaacaaaagaagagcatcacccacaggttcgaaaagatagggaagctggtttcctatgcaactgaagtcacggctgtcgttgagaaaggcaagatcaagaagctgactggggtgaagaccaaagagcttttggtttggatcacactgagtgatatccaagtggatgatcctcccactgggaagatcactttc

SEQ ID NO: 52774 - DNA, 383 bp, Gossypium hirsutum
  Clone ID: LIB3197-058-Q1-M1-F8
aaaaaataaataaagattgaacctttaatatagctgaatcagaatcttgtctcttctataaataaaatttatttttcttcagtccttctcacaatcccccccttctctttgatccacagtttcagtttttctcattagcagtttttaagaaaaaggctaaagttccaatctttacgtgagatatggcgagtactagtaattcaaacaagatgcaaaaattagcttccattgatgcacagttacgactattggttccttctaaagtaagtgaagatgataaattagttgaatacgatgctttgcttttaagatcgattccttgatattcttcaagatttacatggcgaagatcttaaagaaactgttcaagactgttatgaact

SEQ ID NO: 52775 - DNA, 338 bp, Gossypium hirsutum
  Clone ID: LIB3197-058-Q1-M1-F9
aaaataacgaaaaaaaaatgtcagtcaccttgaaatctccgccttcttcatttctttcatcttctttacctaaatcaagattgggatttgcaaatgggtcatcttcttcaactctactcttcaaattcaacagatcttttccagttcttcgtgcctcttctggttcctcttcttctgttgacactggtttgagtactgaattggatgctgtgtctactttcagtgagatagttcctgatactgtgatctttgacgattttgaaaagtttccaccaactgctgcaactgttagctcttcattgttgttgggcattttgagccttccagatactattttt

SEQ ID NO: 52776 - DNA, 422 bp, Gossypium hirsutum
  Clone ID: LIB3197-058-Q1-M1-G1
cggacgcgtgggttccgttattaaacaatggaaaagattcagcacagccatgtccaagcgcgaggattaaagcttcacgtagcccaaagtggaacaggtcctaaggtggtgcttttcctgcatggcttcccggagatttggtattcatggaggcaccagatgattgctgtggctaatgctggtttccgagcaattgcttttgatttcaggggctacggactctccgaccacccacccggagcccgaaaaagctagtttcaaggaccttgtcgacgatgttgttgcccttcttgatttgttgggaatcaataaggtttttcttgttgggaaggattttggagcaatgccttgcttttatggtagcttgtatccaccctgaaagggtgttaggtgtcataacactaggcattcctttccttata

SEQ ID NO: 52777 - DNA, 391 bp, Gossypium hirsutum
  Clone ID: LIB3197-058-Q1-M1-G2
tcttctttgagattttgcttcagcactctaaagcccctgccaagccaaaatgggtatttctcgtgattccatgcacaagaggcgtgccactggtggcaaaaagaaggcttggaggaagaagagaaagtatgagcttggaaggcaacctgcaaacacaaagctatccagcaacaagacggtcaggaggattagggtccgaggtggcaatgtgaagtggcgtgccttgaggcttgacacaggaaactactcctggggaagtgaggctgtgactcgtaagaccagaattttggatgtggtgtacaatgcgtctaacaatgagttggttcgtacacaaactctggtgaagagtgctattgttcaagtcgatgctgctccattcaaagcaatggta

SEQ ID NO: 52778 - DNA, 298 bp, Gossypium hirsutum
  Clone ID: LIB3197-058-Q1-M1-G3
cggacgcgtggagcctatgggaattttgttttggctaatgtttggctgcatgctcaagtaatagctatgaatatgcaagatgactccgatgagaacgtgatgcctgatactgagataagaacaaccggttcacctttatcttggctttatcattacaacctctcatgcaaccctgcctttaggatgattgaacgaactggaatacaccatgaacctgggcttggtggttctacaattcatactactgctgccgcaactgagttatgactcaacagagatgtggggacgtataaactac

SEQ ID NO: 52779 - DNA, 410 bp, Gossypium hirsutum
  unsure (1)..(410): unsure at all n locations; Clone ID: LIB3197-058-Q1-M1-G7
ctcttttcagtcctaaccaaaggcggcccctcaactctcttctcctttagcaatatctttccccttcactgtttcaactcaaagaaatggcggaggagaagaaggctcaatctgctggggtttggcctacggttaaaccttttgtcaatggtggtgcctctggtatgcttgctacctgtgtcatccaacccatcgatatggtcaaggtaagaatccaactgggtcaaggatcggcagcaactgttaccaagaacatgcttagggaggagggtgttggtgccttttacaagggtctatcagcaggactgctcangcaagctacatacactactgctcgattgggatcattcaaaatggtggacaaacaaagcaattgaagccaatggatgggaagcccttacctctatatc

SEQ ID NO: 52780 - DNA, 363 bp, Gossypium hirsutum
  Clone ID: LIB3197-058-Q1-M1-G8
cggacgcgtgggtgaacctttggtaaaaggacataaaagggtatttgaggttttttccaacccaattaattccttgccacctgattttccaaactcaaccgaaatttaattgcctttccccacaaacggatttgaaactgttggaaaacaaaggaataccttttttgttaagtgcttaaaaaaactggtttttttaagttccaatactagaagttggggtgtccttgataataaaccatggaacttaactgaacctcaactcgaatggttcaatgtggcaaatttcaagtccttaaaagaaaaccaatcttacggttgggtttaacattcttttttccacaagttagccttggaatttttgaa

SEQ ID NO: 52781 - DNA, 434 bp, Gossypium hirsutum
  Clone ID: LIB3197-058-Q1-M1-G9
gaagaaagatgatggaaaggggttttattgttttggccttgacggtggttttcgccgcgacggtggttacggcggctgacgagagtgggttagcgaatgagtgcagcaaagatttccagagcgtgatgacttgcttaagctttgctcaaggaaaagcaccgtcgccgtcgaaggagtgttgtaattcagtggcggggattaaagagaataaacccaaatgtttgtgttatattttgcaacaaacacaaacttccggtgctcaaaatctcaaaagcttaggtgttcaagaagataagctgtttcagttaccgtcggcttgtcaattgaagaacgctagcgtcagtgattgcccaaagcttcttgggttattttccgagctcaccagacgccgccatcttgaccaactgctgctctaaagcaacgacacccagtac

SEQ ID NO: 52782 - DNA, 375 bp, Gossypium hirsutum
  Clone ID: LIB3197-058-Q1-M1-H1
cggacgcgtgggctggtgatggcaccacttgtgcaacagtccttacccgcgcaatatttgttgaaggatgtaaatcagtggcggctggaatgaatgccatggacctcagacgaggaatcacaatggcagttgatgcagttgtgaccaacttgaagagtagagcgcggatgatcagcacgtccgaggaaattgcacaggttggaacaatatctgctaatggagaaagggagattggcgagctcattgccaaggccatggagaaagttggcaaagaaggtgttattaccattgctgatgggaaaaccttgtacaatgaattagaggttgttgagggaatgaagcttgatagaggctacatatcccccttactttatc

SEQ ID NO: 52783 - DNA, 362 bp, Gossypium hirsutum
  Clone ID: LIB3197-058-Q1-M1-H2
gttgcaattaccttattcccatttcttcttgtcattgtagctatctgttttagcttttgtgatgccaattccaatgtgctttgcattgaaagtgagagaaatgcccttctgaagttcaagaatgatctcgttgacccttcaaacaggttgtcttcttgggtcgaaggtggggattgttgtaaatggctcggtgtcgtgtgccataactcaacgggccatatcaaccaactgcacttggctgctcctcttccagttccccattttgatgcaccagttgctgaatgggaagcttaccatcgatcaaagaacaattccccgctaaaaagggaaaataatttcttcattgctggagttgaaacatc

SEQ ID NO: 52784 - DNA, 399 bp, Gossypium hirsutum
  Clone ID: LIB3197-058-Q1-M1-H3
gttgtaattattcgatactcatcctttgtcgtgcttgaacccaaccgtaaggaacatgagaaacacgatgagtatgcacgatctttaaacggggttcgatacgccacaccctaataataacttgaattctttacaccataagctgaggcgagaaatatgagacacttgtgcttatcagtgtagaaggggtcgggattttgaaatataaaactgctcttttggtctatgatcggctcgttaattctcttgctacccctaaagacacctttgaattacgcgatgagtggcacacgacacggctacatattgggcagctggtgatagagacttcagctaaactaacggtagcaagtgaaactgatcaaaatgcacaacacttaaagaagatcgctgatgcta

SEQ ID NO: 52785 - DNA, 265 bp, Gossypium hirsutum
  Clone ID: LIB3197-058-Q1-M1-H7
aattgtttgagctagctagctcttactcaaatggcaaccaaaacgatgatgttgcaaatatttccacttttcttctttttgttcagtgtctgcaactccattttccttggtgctaatggagatgacaatggtggttggcaaactgcccatgccaccttctacggtggtgctgatgctaccggcacaatggggggagcttgtggttatggaaacctgtacagtcaagggtatggaacgagcacagcagctttgaacactgcacttt

SEQ ID NO: 52786 - DNA, 422 bp, Gossypium hirsutum
  Clone ID: LIB3197-058-Q1-M1-H8
gggagattcaaacagaggaagaagaagaagagaaaaaaaaatgaagtctcagatctgtttagcctttggaactttggccttgttattagcttcagctttggccgatgacgtcgtcgtactgaccgaagcgaacttcgataaggaagttggtcaagatagaggagttctcatcgagttctatgctccttggtgtggacactgtaagaagctagctcctgagtacgagaagctcggggcaacttttaagaaggctaaatccgtcttgattggaaaggtggattgtgatgaacataagagtttatgcagcaaatatggtgttcaaggctacccaactgttcagtggtttcctaaaggctctttggaacctaaaaagtgtgaaggaccaccccccagttgaggcacttgctgaaattgtaacactg

SEQ ID NO: 52787 - DNA, 394 bp, Gossypium hirsutum
  Clone ID: LIB3197-058-Q1-M1-H9
gttccatgtggccacgcctatggacttcgagtccgaggaccctgagaatgaagtcataaaaccaacaatcaatggagtgctaagcatcatgaaagcttgcgccaaagccaaaactgttagaaggttagtgttcacatcatcagctggaactattgatgttgcagaacaacaaaagccctgttatgatgaaacctgttggagcgaccttgaattcatccaggccaaaaaaatgactggttggatgtattttgtctccaagacaatggcagagcaagcagcctggaaattcgctaaagaaaataacattgattttgtcagcataataccacctttggtggtcggtccatttattatgcaatcaatgccgccaagcctcataactgcactttctcct

SEQ ID NO: 52788 - DNA, 402 bp, Gossypium hirsutum
  Clone ID: LIB3197-059-Q1-M1-A1
gccgcaagcaagacggtgctagacgagctgcaaaagaacttggaactcagcgaaaacaacatggaagcatcgaggatgaccttacaccgattcggcaacacatcgagcagcagcatatggtacgaattggcttatttggaagctaaagaaagggttaaaagaggggataggatctggcaaatagcattcggttctgggtttaaatgcaacagtgtggtttggcgatccatgcgtcgtgtgaggaagccttcaagggataacccatggcttgattgcattgatagataccctgtgagagcttagaattacttgaatggccggtggttgataataaatatgatccttttggggttatcaatctctaagtgggttatattttcaaaaaaaaagggggcgggagaa

SEQ ID NO: 52789 - DNA, 363 bp, Gossypium hirsutum
  Clone ID: LIB3197-059-Q1-M1-A10
accatttcaaatccatttttttttagaatttcccaacgatggcttcgacgattccaacgaaccgatcctcctctgatgacattaccgacacgacgccctttctgtcaccaacaagcaacgtttcaaacgacgactcctccacgcgtcggaccgttcgtcgccagagtctccgcgatgcggctaggttcttgcgccgagccagcagccgaaggatgatgcgtgagccgtccatgctggttcgagaaaccgccgccgagcagctcgaggagcgtcagagcgattgggcgtattctaagcccgtagttgttctcgatattatctggaaattagccgtcgtggtggtggcaagtggtattttgattt

SEQ ID NO: 52790 - DNA, 436 bp, Gossypium hirsutum
  Clone ID: LIB3197-059-Q1-M1-A11
cagggatggcatcgcatgcaagagtgcttgcgaggccttccgccagcctcagtactgttgcagcggcgcgtatgccacacccgatacttgcaagccttcttcctactcccaagtctttaagacagcttgcccacgcgcctacagctatgcctatgatgataaaaccagcaccttcacatgtgccaatgctgccgattactccattactttctgtccttcacctaacaccagccagaaatcatcgcaagaggcgacaacgccagggcagaacacagaaacaacaacaacggcgatgccaacgtcacctcttgtcgacaacactatcatgtcaggtgtgggatgtgctgggtctcatggtgacatggaatccagtcatgacattgaaagctcacctgtcaattgaattgtattgagcccccccccctccccgcgccct

SEQ ID NO: 52791 - DNA, 433 bp, Gossypium hirsutum
  unsure (1)..(433): unsure at all n locations; Clone ID: LIB3197-059-Q1-M1-A12
gaggccttgagaggaaatgggctcttggacttcagtctcgagcccatcctcgtgaaattatgactgaagttctcaaagctctgcaagaactcaatgtctgttggaagaagatagggcattacaacatgaagtgcaggtggctgcctagcattcctggtcttaatgaaggcatgcttaacaataatcactattttggtgatgaatcaaccattgtggaaaatgatggtgttaccaaattgccgaatgttgtcaaattcgaagtgcagctttacaaaactcgcgaggagaagtatctgctggatcttcanagggttcagggacctcagtttctcttcttggatctttgtgccgcattccttgcacagcttcgggtcctctaaaataagcaagctgtatttctaaggacccttactccatgaatctcctatgatgc

SEQ ID NO: 52792 - DNA, 426 bp, Gossypium hirsutum
  Clone ID: LIB3197-059-Q1-M1-A2
atcttcatcttcatcttctctgttcgtccttccagaaaaagaaattcaggttgggagtattgcacagctttcttttggttagctcctctttgtccaccatttttgcccccaatatgaagatcttgttcacgaaagttctaacgaacaccgatgtagagaaaagattggcggttcccaacaattcactgaagcatttcgagcttgaaaatggtaattgctccaaatcttttgaagttaaagatgaaaacggaagcacatggacttttcgttgctatgttcgtaacgacggtgcctacaagaagcctgttttatccagtggttggcgtcaatttgtcctcaataaaggagttcaccagggagatttgatcacactctataaagatgttgaagcagaagcttcgtataagaatcgaattcagagaaaaa

SEQ ID NO: 52793 - DNA, 410 bp, Gossypium hirsutum
  Clone ID: LIB3197-059-Q1-M1-A3
gtgaaaaggcttttgacaatgaattaatcaaagaggaacttgtcaaagcaatagatgaagaaaatcagtgtgacaaaacaaatgaaatcatagtgaatgaagtttcaaaagaagaggtccagggagttgctgaaacatcttatctgacttcagaaccagaactgccagtgaaagatggccttggagaagacgagctaaagggtaaactgattgaagacaaagcatcggaaaccactcaaactgaagagcaagttgtggaagctcaaaagatgagtgaaaatgagatagctgaaaagcagattgtttgtgaggataaaactgttggaaatcctgcccaagcttcagttgcaaagatagaaaccgcaacagtggtacaagaggagtcaagcttagaattaccaaagtcagat

SEQ ID NO: 52794 - DNA, 471 bp, Gossypium hirsutum
  unsure (1)..(471): unsure at all n locations; Clone ID: LIB3197-059-Q1-M1-A4
ccgtccgcacttctnngctgattctgcnnatgtaatcgnngtttcccctttttctggattaccagcnnttcttcgctcagtcgcaccctgtgnnnccggatttnncttcatttaccagcnnatctagcttnntgtgggtatttcttcctttttgttttgccccatattctatcnnntcctcatttnnatggctcnncagttccatgttcnngctttccttgnngaagccaatgttnngaaaatatagtttggaattttcttccttctggtnntcctcattaggaagaaccctcatcagcaanttgtgtctacctactttaagnctctccttgttcttcttttggcaagcgtacctcttctattctctttgtgtcagaagaatcttctcggctctcatgttttacttcagcatccttgtggatctcttcttcaatattctcaatcaggtttgcaattctgatattttcaccc

SEQ ID NO: 52795 - DNA, 436 bp, Gossypium hirsutum
  unsure (1)..(436): unsure at all n locations; Clone ID: LIB3197-059-Q1-M1-A6
aagatcttgaaagtgaagcacttgcaactctcattctgaacaagcttcgtgccggaatcaaggtgtgtgccattaaggccccaggttttggggaaaataggaaagctggcttgcaggaccttgctgctcttaccgggggcgaggtaataactgaagaacttggtcttgacattgagaaagttggagcggaagtgcttggctcttgcaaaaaggttacagtatcaaaggatgacacaattatccttgatggcgctggagacaaggctaccattgaagaaagatgcgatcagataagatcagcaattgaatcaagcacttctgattacgacaaggacaaattacaagagaggcttgcaaagctctctggtggcgttgcagttntgaagattggaggagcaagtgaagcagaattggtgaaaaagaagatagagtactg

SEQ ID NO: 52796 - DNA, 372 bp, Gossypium hirsutum
  Clone ID: LIB3197-059-Q1-M1-A7
gaaaaaaatgggagatcagttagcgaaaggagaagaattcgtgaagaaagcagagaaaaagctaaatggttggggcttgtttagttctaaatacgaagacgccgccgatttatttgataaagctgctaattgcttcaagcttgccaaatcatgggacaaagctggatcaacttatgtaaagttggcgaattgccatttgaaatcagacagcaagcatgaaacagctcaagcttatgttgatgctgctcattgttataagaaaacagctacaaaggaggctatatcttgcttgcagcaagcagtgaacttgttttgtgatattggaaggctaagcatggctgcaaggtattataaggaaattgctgaattata

SEQ ID NO: 52797 - DNA, 424 bp, Gossypium hirsutum
  Clone ID: LIB3197-059-Q1-M1-A8
ccgccctcggagctgaagtccgttggtgttcttgcaacattttctctacccaagaccacgctgccgctgccatcgctcgtgactccgccgctgttttcgcttggaaaggggagaccctccaggaatactggtggtgtactgagagagcccttgattggggtcctactggtggacctgatctgatcgtcgatgatggtggtgatgctactttgttgatccacgaaggtgttaaagctgaggaagtttatgagaaaactgggcaactcccagatccggcttcgactgataacgctgagtttcagattgttctaaccattatcagagatgggttgaaagcagatcccaagaagtatagaaggatgaaggagagattggtagggtttctgaagaaactacaactggagtaaagaggctttatcagatg

SEQ ID NO: 52798 - DNA, 430 bp, Gossypium hirsutum
  Clone ID: LIB3197-059-Q1-M1-A9
cccacgcgtccgatttcatataattttcttccaatgttaaaggagttgtttataggcataactgaagttccatttatatgtgcagaagaagtctctttgtgggttttggctgcaatgaaagatgttggacttgggttcttaattggagtcggctttgctgctttcagcttcgtttttgccttgggaactatagtaggagcaatgaaaggccaaacgactgaaactgggtcgttcagtgggactggacttggtgctgttgcaggtgcaaccacagcccttcaattgcttgaatcattggctgatggggagttattatcacagataactttattagttaggttagtgagtgagaaggtcttcattgcatgggtgaattcagcaatgctaaaagcttttcaatgggaaatgaacatatttgaatcaacatata

SEQ ID NO: 52799 - DNA, 441 bp, Gossypium hirsutum
  Clone ID: LIB3197-059-Q1-M1-B1
ccaattgatcttctttatgcaagcatctctcatttggttgtccctcatgatctgggcatctcagacatttcagtactgtacagtgtagatgagcctactgttcgaagtcttaatggctgcagggttgcagatcaaattctgaaactggtgccaaatgttgagcattttcgcacaacactccgatgtctgaagttttgggctaaaaggcgtggtgtttattccaatgtgactggatttctcgggagtgttaattgggcacttcttgtagctcgaatttgccaactttatcctaatgcagctccaagtatgcttgtttcacgattttttagggtctttacccagtggcgttggccaaacccagttatgctttgtgcaattgatgaagatagactcggattttctgtttgggatcctcgtaaaaaccctcgtgataggactcat

SEQ ID NO: 52800 - DNA, 403 bp, Gossypium hirsutum
  Clone ID: LIB3197-059-Q1-M1-B10
aaaatacaaaacaaaaacccatattgtagcttccaccatcttgctttcaaagccttgttttcattctctcaacaatatcaactgaaatatcggccgacaggtatttctcccaatactcaatcttcggagcatccggagagcccagaagaaaagttgtttccggcttcctcctatttggtcaaattagtaaagggaaagggtggacggtagagatgccaatggcggcgggggcagcgactccgagggaaagggttcaagctatgggaccagcagcggtggtaccgatgatgcaagctgtgccggctgttgctgatgttttggccaaggacacgatcatttcttggttccgaggggaattcgcggcggccaatgctatcatcgatgctctttgcggtcatttggc

SEQ ID NO: 52801 - DNA, 441 bp, Gossypium hirsutum
  Clone ID: LIB3197-059-Q1-M1-B2
caccagaccacctcttcattttgttcagtatctatctgtctcagattcaatattgtgttccaagcggggtatgcatgtttcaagttttccaatacaatagcataggagatccttacggacattcataccagttcaaagcaagattgctgcaatcttatgctaatactactaaagcagaatatcttgtaaatagaagaggaaaggaaaattttgagaaatgaaaatagccctctctctccttataaacagattctattgtggttgtcagactctgcatttttagtggagaaagagaccaacagaatactggggtaaaaattttgaccacggaggaaaaccaaaatggaaaaacagattcaaaaattccatccactaaggattgtgtgatttgggtagcatattgtagctaaaggagagtgaaagaaagacttggaaaggtgc

SEQ ID NO: 52802 - DNA, 367 bp, Gossypium hirsutum
  Clone ID: LIB3197-059-Q1-M1-B3
cggacgcgtgggggaaatggcaggcgtcgaagcagggaaggaggaggaggcgaccgctgtgagaatcaccggaaaaagccacgtcaagccgggtaagttgataggaagaaaagagtgtccgttggtcacatttgatctcccctacctggctttctattataaccagaagctgctgttttacaagaacgacggtggtggtgagttcgaggacaaggttgaaaagctcaaggaagggctgagggtggtgttagaggagttttatcagctaggaggtaagctcgggaaagatgacgatggggttcttagagttgattatgacgatgatattgatggtgttgaagtggtggaaagccgtggaaaagggatt

SEQ ID NO: 52803 - DNA, 434 bp, Gossypium hirsutum
  Clone ID: LIB3197-059-Q1-M1-B4
cccacgcgtccgctctcaaaaaaaatctgaggaacagtgacactgaaaaaacagcaaaactaacgtcataatgttatgtttcagagcaaaccctcctacattgtttcttctttttcttctctctttgtttcttttccgacctgaagtagtttctgaagcctcaattttcccaacttcacacatccaagggtatcataaaagcttagtttctggggagaaagagcagggtgaagtgttgccatggaggaagatagaaaggaggaaccttgtagagggaaatgaaggagccaacaactcttctttgattttggctgaaaagaggactcagaggaaagaccctcttaatgattttaagaagtacactggtggctggaacatcagcaatcagcactattgggcttctgtgggttttacagcggctccattctttggca

SEQ ID NO: 52804 - DNA, 378 bp, Gossypium hirsutum
  Clone ID: LIB3197-059-Q1-M1-B7
ctattgccgtgcttgacaagattgcaatgtctattgatgtcaaagaccgtgccacaatgttgggacttgtgaagagctgtatagggacaaagttcactagccagtttggtgatctgattgccgatttggcaattgatgcaactcaaacagttggagttgaccttgggcaagggctgcgagaagttgatattaagaagtacattaaagtagagaaagtaccaggtggtcagttggaagattctaaggtcctcaagggagtgatgatcaataaagatgtagttgcgcctggccaaatgaaacgaaagatcgtcaacccacgtattattcttcttgactgtgcccttgagtataagaaaggggagaaccaaacaaatgccg

SEQ ID NO: 52805 - DNA, 378 bp, Gossypium hirsutum
  Clone ID: LIB3197-059-Q1-M1-B8
ctgttcttcaaccaaaagggaaaaagctggttcccccatttgctcccaaaggtgcttatgggagattattgtttttgtgggcatctgaccttttaaatcaattacaagagagaatacagatatgggcaccatacaccgcagtggagtttttaagaaaacaaatgataaagccaggctcgttatcgcaacaattcttggaattgtgattggattctttattggtgtttcatttccgtcagtttccttttacaagattcacttaccttcaaaccttagatcggcttttgatgcatccatagctaatgaccaagactttatggtcaggtcacctgagagaactgcagacaatcttcctaagatatatgttcctacaaatcc

SEQ ID NO: 52806 - DNA, 406 bp, Gossypium hirsutum
  Clone ID: LIB3197-059-Q1-M1-B9
gcaatgtagttggatccgcaaatgggcggtcgaaaaccatatgaaaaggaggagaggtgaggcttttgagaatgggttcgtggaggtaatgagcaattgcaggctcactatatgtagcatcttgatctgtttatgttttggtgcaaagatctccgaagaacggattaagaaaatcgaaagcatactcaaagatgtaatgctggtaacatcgccgcagctaccggatttcttgccgatcctcactccgttgtttcgtcagctaatgaaagaggccaaagcactaagaaagaggcaattggattgctaggctccattaataaagaaccggagagcttttgttgagaaaagtgaaaaccctaacccagaaaatgtgaggtccatcggtgcaggctatatagactcactc

SEQ ID NO: 52807 - DNA, 438 bp, Gossypium hirsutum
  Clone ID: LIB3197-059-Q1-M1-C1
cggacgcgtgggcgacaatggagagtttcggggggtggttccttatgcttacaatggcaagtttggcatcacccgcactttccgatctggtcctttccaaagtcgatcgacgcatatatttgacatcacatattgttcggatttcttcaactatgaaggtggagaatgcaggttccgaaaaggagtccaaggttttgctggcttttcctgagcaacaagccaaaaatatggcatatttgattgctactccacatgaagggaaagggaaaggaaaaaaccctgttgttgttctccctgttgaggctgccaacccaaaagacatgcctgctgctttgacattctattcagtatctttgcctaagggattagctgagggtgatagcttcacttttgatgtcttggccgtatttacccatgccttgcgacctattcctgagc

SEQ ID NO: 52808 - DNA, 370 bp, Gossypium hirsutum
  Clone ID: LIB3197-059-Q1-M1-C2
cggaccggaatctcccttctcgacccatacctccccttttttttatacacacatcaactgatttccacgggacattcatcattccctggggggagggcatccaaaaacttccatttcaatacatttcctgttccactgctagccctttatgctactacatgaataaccaaactctctcttattaaccagatatttaattttatctaaaccgcattccttcagattattcctctccttaaatccaccttacatcgcatatatccatattaattcagagaccaactattctacttttcctttaaaaattaaccaattctattcattatcatctgccatacattctaaatcttaaccaaacaactggaccttt

SEQ ID NO: 52809 - DNA, 439 bp, Gossypium hirsutum
  Clone ID: LIB3197-059-Q1-M1-C3
ggaaatggcaggcgtcgaagcacggaaggaggaggaggcgaccgctgtgagaatcaccggaaaaagccacgtcaagccgggtaagttgataggaagaaaagagtgtcagttggtcacatttgatctcccctacctggctttctattataaccagaagctgctgttttacaagaacgacggtggtggtgagttcgaggacaaggttgaaaagctcaagggagggctgagggtggtgttagaggagttttatcagctaggaggtaagctcgggaaagatgacgatggggttcttagagttgattatgacgatgatatggatggtgttgaagtggtggaagccgtggcagaggggattaccgtcgatgaattgaccggtgatgatggtacgagctcatttaaggaattgataccttttaatggcgtcttgaacttggagggt

SEQ ID NO: 52810 - DNA, 436 bp, Gossypium hirsutum
  Clone ID: LIB3197-059-Q1-M1-C7
gctatcctccgtggctaagaattttactccttcttcaatacaagagctctcacaggttgctcagaaatgcaacgccattaaccttgctgagggcttccctgatttccctgctcctccttgtatcaaagaagctgctgtttcagccattaataacgatttcaaccagtataggcgtgtgcaaggaatttgcgatcaattggctcttaaaatgaaaaaaacgcatggtttaaacgttaaccctttgactgatatagctatatgctgtggacaatctgaagcatttgctgccgcaattttctccattataaaccaaggagatgaagtgttgttgtttgatccttgttatgaaacttatgaaggatgtataaccctggcaggaggaattcctgtatatgtggcgcttgaaccgcctcaatggaccttggaccctgaaaaa

SEQ ID NO: 52811 - DNA, 376 bp, Gossypium hirsutum
  Clone ID: LIB3197-059-Q1-M1-C8
ctttttccaagacacaaatggactgttgttcaaggcaattccagcttcccttggagtcagtgcaactaaagagtaccatgtcaattctcttgctgttccacggaaagcaaaagaagctattggaggaattactaaactcactcatagtgatgggagatcgatggtgatcaacgtggaatacaatcagcttgatcctctgcttagagccaccggacatccagatggagatgttaattgtgagaccggctattctccttttccaggaaatataaaccaattgattttggagcttggtccatacattaaggagctcaccaaaacaggaggtgctattaaggaatttgttaaccccaagtataaagatgctagtaaaaca

SEQ ID NO: 52812 - DNA, 435 bp, Gossypium hirsutum
  Clone ID: LIB3197-059-Q1-M1-C9
cccacgcgtccgcgatgatctctccgcacgattcgctgctctcaaggcttccttgtcttcatcttcttctaatcctactgctgctactagtatttccactaacgaagttcgtatcggtctcgaaaaatccgacggcgaagatgatgaggaagatgaagttgaaagagtggtccaatgggccaaggatgctgctcgccttgacccttctcctgcctctgatgaagatgatgatgacctaatcggttctgattccgatgataaagatactgactatgatgatgatcctaaacataaaaaaaaggaatcaaaacttaggaaatgagggtctccttaaagagcagccttgcagcaataatccattgccaagcctgaaacttttaatcctatttttatcgaacatgttcatgttcagattggatgcagtgaatactttca

SEQ ID NO: 52813 - DNA, 399 bp, Gossypium hirsutum
  Clone ID: LIB3197-059-Q1-M1-D1
cgactccttatttctcttctcctaaagattcttctcaattgaatctttggcgttatcggttttacacagcttttggtttggaattacgggtcgatcataggatggttgactgaatcggcttccaaattgggtttttgttttgtgttgtaagcaattgagtgaattgggattataaatgcataaatggggtttggattgctttgtctttgttgtttcagaaagtgatttgtttgaatttatacttttggttggtttaaaatagtttaactattttggagtggcatagggattgttatagtttattttaaatgaaataaaacacaggtcatcctgctctactcaattactataaatttagggagacaagatgtttgggagtatgatccagtacttttcaac

SEQ ID NO: 52814 - DNA, 437 bp, Gossypium hirsutum
  Clone ID: LIB3197-059-Q1-M1-D2
cttcctcaaatcttcttcttctttttgtcttctgtggtgttttttagtccccaaatggatgctccctttcccttcaaatggcaacccctcccctttcatcccctacttatctcaccaccaatttaggcgtcggctacgccatcgtcgtcgccctcggcttcctcctcctcctctccactctcctcctcgcttcctacatttgcttccgctcttcctcgccccttccacctcgtgccatttcccccaaccccatttcaacacccaccgcctccaactccaacggtatcgtcctccccaggattgttttcatcggcgaagaagaccatgaacacgaccaataaaacgtcgtcgtctttgggcttgatcgtgccgtcataaactcttaccccaagttcccgttcaacaaagaagaggtgtctactgcggttgaggtgacg

SEQ ID NO: 52815 - DNA, 438 bp, Gossypium hirsutum
  Clone ID: LIB3197-059-Q1-M1-D3
ctcttcaattcctcatttcaagggagagagtgtatcagtgtttcttcccctcttttacttaatttctctccgccatggctctctccgtcgagaaaaccgccgccggccgtgagtacaaggtcaaagacatgtctcaggctgacttcggtcgtctcgagatcgagttagctgaggttgaaatgcctggtttaatggcttgtagaaccgagttcggccctgcccaacctttcaaaggagccaaaattactggttctcttcacatgaccatccaaaccgccgttcttattgaaacccttaccgccctcggagctgaaatccgttggtgctcttgcaacattttctctacccaagaccacgctgccgctgccatcgctcgtgactccgccgctgttttcgcttggaaaggggagaccctccaggaatactggtggtgtactg

SEQ ID NO: 52816 - DNA, 428 bp, Gossypium hirsutum
  Clone ID: LIB3197-059-Q1-M1-D7
ctttgttcctcatcctctgatccgtctcttcccgcattcgtcccgccggatttaacaagttttcaaacgaaaaatgagggaaatccttcacgtacaaggcgggcaatgcgggaaccagatcggatccaagttctgggaagtggtttgcgacgagcacggcattgaccctaccggacgctataccggaaactccagtctacaattggagcgcgttaacgtttactacaatgaggcttcttgtggaaggtttgtcccacgcgccgtgctcatggatcttgagcccgggaccatggatagtgtgagaaccgggccttatggtcagatctttaggcccgataactttgtcttcggccaatctggagctggtaataattgggctaaggggcattatactgaaggagccgagcttattgattctgttcttgatg

SEQ ID NO: 52817 - DNA, 435 bp, Gossypium hirsutum
  Clone ID: LIB3197-059-Q1-M1-D8
cggacgcgtgggtccaattcccacacaaaaatccaattccattaacaaactcaaaatcatcaagttgttcaaaaaaaaaaaaaaaaaaccatttcagctttgactttaaggaattgtttttcttttgtcagctgaaaaaaattgtaaatttcaagctttgggcgtttttgttttcaatcagatctgattatgttgaaggtcaaatctttgatttgatacttggaagaaataggcgttggaatttgcaacataatcatcaacttttggttttaattgtaatggatttggatgatttcagatcagttcttgaaactgctggtgttgatgtgtggacttttatagataccgcaatcctggtagcttctttggattatggccaagagtttaagcaaaggagagatgggattgtggagaggctttatgctacttccatgg

SEQ ID NO: 52818 - DNA, 417 bp, Gossypium hirsutum
  Clone ID: LIB3197-059-Q1-M1-D9
cgaaatggtcttggactcggagctaatcgcccgactctgggagttcttgggtgaatcggacctcaacaccacaactacagcaatcgtgcggcggagattggaggaagatttcggtattgatttgacggacaggaagaagtttattagggaacaggtcgatttatatctccaaaaccagttcgaaaatgccgaagaacaacaacaacaacaacaaaatgaagatgatcagacggctaagattaaatcagaggaaaccgacggctctgattcggacgacgaagaggaggagcacgaaagagcgaagaacaaaaaggctacctcaaagaaacggtcaaaaggagtcaatagtgaaggtaagagaagaggaggtggttttaacaaagtaagcagactttccccacaacttcgggaactttt

SEQ ID NO: 52819 - DNA, 438 bp, Gossypium hirsutum
  Clone ID: LIB3197-059-Q1-M1-E1
ggataacctgaaaacagagagtactccagaagaacacaaattggttattacagacgttcgttttagaccaaattcatctcagttggcaacagcttcttttgataaatctgtgcggttatgggatgcagccaatgtaatcatcttcttcttcttacaacttggatctttgtaaaagttttgcggatatctctggttatgactttagctattctatactctctttgctgacagttttctggtattgtagacatttaggaagcatgcatgataaatatttctatgctactgtggttaacaagctaagttcattgttacagccaggctattgcgtgaaagcatacaatagccatccttcacctgtgatgtcccctgatttccaccccaaaaagacggacttgttctgcttttgtgataatgacaatgaaattcgctatttta

SEQ ID NO: 52820 - DNA, 439 bp, Gossypium hirsutum
  Clone ID: LIB3197-059-Q1-M1-E2
ataacccaataattttctctctttttttcctccaaaaacttgggttttctttcatttacatgcaagtcctaaaataccccaaaaatttcataaaaaaagtgttcctaaaagctcaaaagaattcataaaaatagaaatggaaactgggttttattcagcatgggagaatggttctttattagaagaagatggtgatgatgaactgatccctcagccattaacaccaacggagccaatggagtttttatcaagatcatggagtttatctacatcagaaatctctaaagctcttgcccagaaacacaatcactttgaatttgatcatcataataatgataataagaatcaaagttcattgatttcagaatcctttgatgcaccacaaattgcagggaaagtgatgaactccattaatggtcgaagaacaggcacaatcagc

SEQ ID NO: 52821 - DNA, 96 bp, Gossypium hirsutum
  Clone ID: LIB3197-059-Q1-M1-E3
catgaatcatgttcttggtaatggataaaatgatattactttctgtatcacaatggtttggtgataaatgtattagtatttgaagtatcgttgcag

SEQ ID NO: 52822 - DNA, 434 bp, Gossypium hirsutum
  Clone ID: LIB3197-059-Q1-M1-E7
tcgctctgcttcccactctctatgctatgcagcaaccttcctcaggtgataagaatcataccttacagtgctgtccaactctttgcatatgaaacttacaagaaacttttcaagggaaaagacggcgagttatccgttgttggaagacttgctgctggagcttgtgctggcatgacatctacttttataacatatccgttagatgtcctcagactacgcttagctgtggaaccagggtaccggaaaatgtctgaggttgctttgaacatgttgcgagaggaaggttttgcatccttttattatggtcttggaccttctctcattggcatagctccatatattgctgtgaacttttgcatatttgacctcgtgaagagggctttgccagaaaaatatcgtcagaagactcaagcatctctactaacagctgtagt

SEQ ID NO: 52823 - DNA, 435 bp, Gossypium hirsutum
  Clone ID: LIB3197-059-Q1-M1-E8
caaaatcaaaccagtatccaaacacttcattgatccagattgagggagttaacactaaggaggaagtagcttggtatgccggcaagcgaatggcgtatatttacaaagctaaggtgaagaagaatggctcgcactatcgctgcatttggggaaaggttactagacctaacggaaatagtggtgttgttcgtgctaagttcaagtctaatcttccccccaaatctatgggagatagagtccgagtcttcatgtaccccagcaatatataagttgtctaaatgcccgttgttcgatcgatgactcgagtgattctatcttttctctccgtctatctcaaaatgttgtgtgtttttgaggccatttttttcttcattaggatgacagtggattagactttagtgttatcaaagattttccagtaattaattttgacga

SEQ ID NO: 52824 - DNA, 319 bp, Gossypium hirsutum
  Clone ID: LIB3197-059-Q1-M1-E9
gtggagagccttttttgtgtagcgattctcagttagtcttttctttaagcttacagcttctctccagagttttataatgggtaaggagaaggttcacatcaaccttgttgtcattggccatgtcgactctggcaagtcgaccactaccggtcatttgatctacaagcttggtggtattgacaagcgtgtgattgagaggttcgagaaggaggctgctgaaatgaacaaaaggtcattcaagtatgcttgggtgcttgacaagcttaaggctgagcgtgaacgtggtatcaccattgatattgccctgtggaagtttgag

SEQ ID NO: 52825 - DNA, 398 bp, Gossypium hirsutum
  Clone ID: LIB3197-059-Q1-M1-F1
cggacgcgtgggttcggcagcctctcggtttctgagtaatataaaaaaggatggggctggcttttgctaagctgtttagtcggctgtttgccaagaaagagatgcgaattcttatggtgggtcttgatgctgctggtaagactaccattttgtataagctcaagctcggtgagattgtcactaccattcccaccattggctttaacgtggagaccgtagaatataagaacattagcttcactgtttgggatgttggtggtcaggacaagattcgacctttgtggaggcactacttccaaaacactcagggtctaatctttgttgttgatagcaatgacccggaccgtgtggttgaggccagggatgagcttcatcgtatgctaaatgaggacgagctg

SEQ ID NO: 52826 - DNA, 429 bp, Gossypium hirsutum
  unsure (1)..(429): unsure at all n locations; Clone ID: LIB3197-059-Q1-M1-F2
gaacgacggtggtggtgagttcgaggacaaggttgaaaagctcaaggaagggctgagggtggtgttagaggagttttatcagctaggaggtaagctcgggaaagatgacgatggggttcttagagttgattatgacgatgatatggatggtgttgaagtggtggaagccgtggcagaggggattaccgtcgatgaattgaccggtgatgatggtacgagctcatttaaggaattgataccttttaatggcgtcttgaacttggagggtcttcacaggcctcttttgtccatacagttgacgaagttgaaagatggtgttgcaatggggtgtgctttcaaccatgctgtcctcgacggaacctccacttggcattntatgagctcttgggctcaaatctgtaacggtacttcgagctccgtcgttgtgcc

SEQ ID NO: 52827 - DNA, 439 bp, Gossypium hirsutum
  Clone ID: LIB3197-059-Q1-M1-F3
aattttgggagctctcattcttctaattcagctcagcatcagtcagtctctgtgaatgagcagttggaagagaagtggtatgctagtccagaggatatcaatgaaggtgtttgcacaattttatctaatatatacagtttgggtgtgctgctttttgagttgctttgtcaatttgaatctgagagaggacatgctgctgcaatgttggatctacgccataggatttttcctccaacttttctgtcagaaaatctcaaggaagctggattttgtcttagactacttcacccagaaccttctttgcgcccaacaaccagggatatcctacaatctgaagtacttaatggattccaggaagtatttgcagaagaattgtcgtcatccattaaccaagatgatactgaatcagaattattattgcatttccttggtttatcaa

SEQ ID NO: 52828 - DNA, 408 bp, Gossypium hirsutum
  Clone ID: LIB3197-059-Q1-M1-F7
aaaacaaatcacctttgctttctttgtgaaatctttctgatgtcttattgcagaaaaatatttggtgtacaatcatccttttctgtgtgtgtgtatctctttatagatcaaagaaaaaggctttataacctcagtctattacatattttggaaagaaatccttgatttctttccatatttgtttaatctgtatattgtgttctttctttccatatttgttctttgtctgtcgcgatttctttcctttgtttgaaggtgagcgcgaggatctcggtggcgagacaagactgaggcgtggtgtgctgatgatggtgacgatctcggcgttgtttgcgcgccggtggtggcgcgacatccagtagctgaggtcaaggaaaaagtcgtggcgctggtagagccttgacatga

SEQ ID NO: 52829 - DNA, 401 bp, Gossypium hirsutum
  Clone ID: LIB3197-059-Q1-M1-F8
cccacgcgtccggggagaagccttgaatcttctttcgctaagtggtagttcatccgtggagtgggcacacaggtcttttgtctcacaaagacaaccactgacatggtacaaaacaactttcaatgctccagctggaaattctccattggctttagatatgggtagtatgggcaaaggccagatttggataaatggaaagagcattggacgccactggcctgcatataaagcatctggaaattgtggtatctgtagttatgccggaacatttaacgagaagaaatgtggaactaattgtggaggggcctctcaaagatggtaccacgttcctcgttcatggctcaacccaacagggaaatttgtgttgtgtttgagaatggggggagatccgaatggaatac

SEQ ID NO: 52830 - DNA, 438 bp, Gossypium hirsutum
  Clone ID: LIB3197-059-Q1-M1-F9
ccagtcgaagctggactgacatgggccatagggaagaggagaagagcagaaggtggattcttaggagctgaggtaatcctgaaacaactggcagagggtccgtcgatcaggagagtcggcttcacctccaccggcccacctccaagatctcacagtgagattcaggacgagaaagggaacaacattggagaaatcaccagcggaggatttagcccctgcctgaagaagaacatagcaatgggatatgtgaaatctggattacacaaggcaggcaccaaagctaagattttggtaagaggaaaggcctatgatggagtagtcacaaaaatgccttttatacccacaaaatattacaagccatcctaagatggaatttacgctttcagctcctcagttttcctgcgttgtttcatctgcaatcaaatgccaatgccctgt

SEQ ID NO: 52831 - DNA, 437 bp, Gossypium hirsutum
  Clone ID: LIB3197-059-Q1-M1-G1
cccctttcaatgcccacttttctctttcggattttcttgctatacaatctccttctcgactatttggtccccagaaagctcaaatctttcctctctccttcttgtactaccaccaccccctttgtttctgtcggaggtgaaaccgaaaagaacccatctccggcagttgcattggcatcggtctcccctcgctgtcctctaaaaagaatggacgctgctgagttgaagagggtgttccaactgttcgacaagaacggagatgggaccatctccaagaaagagttgaacgattcgttggagaatatgggtatctgcatccctgatcctgaattaacccaaatgatcgaaaagattgatgtcaacggcgataagtgcatcgatatcgacgagttcagtgagctgtaccgatccattatggataataaggatgaagaaga

SEQ ID NO: 52832 - DNA, 393 bp, Gossypium hirsutum
  Clone ID: LIB3197-059-Q1-M1-G11
gtctttttcggggttttctcttttttttttcgtcggatcttcaacacttttttcaaaaatggctgagcacgaagagaagaagcacgaggaatcgttgatggaaaggatagccgagaagatccaaggtcatgattcgtcgtcatcggattccgataatgacaagccatcggaatcatcgatcaaggccaaggtcttccgtctttttggaagagaaaagcccgttcaccacgttctcggtggaggcaaaccggctgacattttcctttggaggaacaaaaagatatcggcaggagcgctcggtgtcgcaactgtgatatggattttgtttgaaatgctcgaataccaccttctcacactagtgtgtcatttgttgatacttgctcttgcagtact

SEQ ID NO: 52833 - DNA, 435 bp, Gossypium hirsutum
  Clone ID: LIB3197-059-Q1-M1-G12
cggacgcgtgggatcattgcccttcttaacaattttgcactctctccgatcaatttgaaacattcctgtattctctgcagaacctccccattcttcttcttctctctattgtaaagtaggcattagttaaggtgttactgtacaggccgcccgaatccgtatgatggagttgtacagtcgcatccagccacggaatgggtctcaatcgggttaccagtccgaatggagccccgctggtcctgagactggcctggaagagtcaatgtggccattgtcgttggggggcactgaatcctacccggaaccggcccgggtacctgactgtgtttactacatgcgaaccgggttctgtggatatggtaataggtgccgctacaatcattctcgtaaccctgccctggttgaggctgctgtaagagctacaggggtgtatcc

SEQ ID NO: 52834 - DNA, 403 bp, Gossypium hirsutum
  unsure (1)..(403): unsure at all n locations; Clone ID: LIB3197-059-Q1-M1-G2
cccacgcgtacgaaatcgccgggtttttgaaccttgcagaaaccagaaaactttgattctgttctctcttttccagaagctaattgttatacttgggttgtaagaaaaattggaggatatgtcaagtagctcaaggggagatggagaaaactccattgatgttgaggaactcttggagatcgaaacaagatgcagagagctacggaaagaaaaagacatgttgaaagaatcacaacctcagggctttgaactgatcaggggactagaactacatgtgaagtctctatcagaagcttgtacccaagacaaaaaacatattcaaaaattggaaagagagctaaaaaattgctctcaaganattggtaatggttctttttttcctttgaaatattgctggggggtg

SEQ ID NO: 52835 - DNA, 434 bp, Gossypium hirsutum
  Clone ID: LIB3197-059-Q1-M1-G3
cggacgcgtgggcgatgaagtgcggactggcccttatcgtcaacttttccaccctgagcagcttatttctggcaaggaagatgctgctaataactttgccagaggccactatacaattggaaaggaaattgttgatctctgccttgatcgagctaggaagttagctgataactgcactggtctgcaaggttttatggtgtttaacgctgtcggcggtggaactggttctggtttgggatctttgttgttggagcgcttgtcggtagattatggaaagaagtcaaagcttgggttcaccatctatccttcgcctcaggtctcaactgcagttgtggagccttacaatagcgttctgtccactcattcgcttcttgaacacacagatgtggctgtgctcttggacaatgaagcaatttatgacatatgccggagat

SEQ ID NO: 52836 - DNA, 435 bp, Gossypium hirsutum
  Clone ID: LIB3197-059-Q1-M1-G5
cccacgcgtccgcccgtacaccattgtttgcatggattgtgggttattcatctggatgtgtagcaaccctccctcttctgtattggcgttatcgtcatcgtaaccaggcttctgagcaagactcagctcaaaatcgccatgcttcacacaataatgcccctgccagatccttttctctctctgttactaggacttctgatgggggtgatcatcgaactgcaactacatcacctagaggtggccaaaacatggcaataacaagtgccataataaaagctctagtggaatacttcagaacgatcttagattgcttctttgctgtttggtttgtggttggcaacgtctggatctttggtgggcactcatctgccagtgaggctcctaacttgtacaggttgtgtatagtttttcttacaattagttgtatcggatatg

SEQ ID NO: 52837 - DNA, 394 bp, Gossypium hirsutum
  Clone ID: LIB3197-059-Q1-M1-G6
cttcacctccactgcagcaggagcagagggaaaaaggataaaagcatcgtcgtgttctcgcttcttcaactctgtctctacgtctctgaacctcctcctttcgttcttttcttattcagtattgtaaaagatggccgatgctgaggatattcaacccctcgtctgtgacaatggaactggaatggtgaaggctggttttgctggtgatgatgctcccagggctgtttttcccagtattgttggtcgaccccgacacactggtgtcatggttgggatgggtcagaaggatgcctatgtaggagatgaagcacaatccaaaagaggtattcttactttgaaatatcccattgagcatgggatcgtcagcaactgggatgatatggaaaagatctgg

SEQ ID NO: 52838 - DNA, 366 bp, Gossypium hirsutum
  Clone ID: LIB3197-059-Q1-M1-G7
cccacgcgtccggaaatctcgagaacctctcttcattctctatttcctccgtgaaagctgctgttgtgctgatccaagtgataaaccagtgtaaagatgagcgttgttgggtttgattttggcaatgagagctgcattgttgctgttgcaaggcagagagggattgatgtagtgcttaatgatgaatcaaagcgtgaaactccggctattgtgtgctttggggagaagcagagatttattggtactgcagggggcgtcttcaatgatgaaccctaaaaattcaatttctcagattaaacgggtgattggccgtcaattctcagatcctgagttgcaaagggatatcaagtcgttacccttcaatgt

SEQ ID NO: 52839 - DNA, 396 bp, Gossypium hirsutum
  Clone ID: LIB3197-059-Q1-M1-G8
agagaacatttgggtgagggttttagagagagaaagagaaggccggagtgaaagacaagacacagagagagagacagagagagagatgtcgggaggaatagcgcgtggtcgactcgccgaggaacgtaaggcatggaggaagaaccatccccatggttttgttgcgaaaccagagacgttgcctgatggaacggtcaatttgatggtgtggcattgcacgatccctggtaaagcaggagtaagtcgaagaacttctatttaatttctgtatttttctttttcattatcgtcggtaaagtttaatggattctgcttgttgagtttggttcgtcaattattttctcttatttctttggacgtggatgctgttgtgctgtttatagattttaagatttt

SEQ ID NO: 52840 - DNA, 343 bp, Gossypium hirsutum
  Clone ID: LIB3197-059-Q1-M1-G9
tcctgctctgcttaaatgggctaacagattctgcaatgatgccgccgtgaaagatgtcatgcctgagaccgaaaagcttgcggagtttgctaagatgcttacgggcagagtgagagccactcccacatcttgaattgccaaagggagccatatttcttggctcttgaccatattttacatgcaagtgtctcctttccggcttttctaaataaaagtatggcatttttaccccagtccctacttttggagcgtttgactgtagattatggcaaagaaatccaagttggatttcactgaattaaagggcggccgatttatagaaatcaggtttacagaccctacc

SEQ ID NO: 52841 - DNA, 435 bp, Gossypium hirsutum
  Clone ID: LIB3197-059-Q1-M1-H1
gcctactgttattgatgaagtgaggactggtacttaccgtcagcttttccaccctgagcaactcatcagcggcaaggaagacgctgccaacaacttcgctcgtggccactacactattggcaaagagatcgttgacttgtgcttggaccgtatcaggaagcttgctgataactgtaccggccttcaaggtttccttgttttcaacgctgttggtggaggcactggatctggtcttggctccctccttttggagcgtttgtctgttgattatggcaagaaatccaagttgggtttcactgtcttcccatcaccccaggtctccacatctgttgttgagccctacaacagtgtcctctcaactcactcccttttggagcacactgatgtggctgttcttcttgacaatgaggctatctatgacatttgcaggcgctc

SEQ ID NO: 52842 - DNA, 358 bp, Gossypium hirsutum
  Clone ID: LIB3197-059-Q1-M1-H10
cgaaagcgcttgagttaattttaagtgtaggtcagccttaacaaaaaaatgtctcggagatatgatagccgcacaacaatcttttcccctgaaggccgtctctaccaagtagagtatgcaatggaagccattgggaatgctggctctgcgattggaatactatcgaaggatggtgttgtcttggttggtgaaaagaaagttacttccaagcttcttcaaacctccacatctacggaaaagatgtacacgattgatgatcatggtgccttgtgccgtggcgggaataatgactgatgcaaatatcctaatcaacactgctagggtgcaagctcaacgatacacatatgcttaccaagag

SEQ ID NO: 52843 - DNA, 436 bp, Gossypium hirsutum
  Clone ID: LIB3197-059-Q1-M1-H11
gaagcaaagcaatggcaaggatcaaggttcatgagttgcgacagaaatcaaaaaccgatcttttggctcagttgaaagatctcaaagctgaacttgctcttcttcgcgttgctaaagttaccggtggtgcacctaacaagctttctaagataaaggtggtgaggctgtccattgctcaagttctgactgtaatctcacagaagcagaagtctgcattgagggaaggcatacaagaagaagaaattcttgcctctcgatctccgtcccaagaagacccgagctatccgcagaaggcttaccaagcaccaggcatctttgaagaccgaaagggagaagaagaaggaaatgtacttcccaatgaggaagtatgccattaaggtgtagggtaggatctctcacattctatttacatatcgattcgctctttactttctag

SEQ ID NO: 52844 - DNA, 191 bp, Gossypium hirsutum
  Clone ID: LIB3197-059-Q1-M1-H12
cggacgcgtgggttcgcttattggcctccgagaagaagccgacgccgccatggttcacgtcagtttctaccgcaattatgggaagacatttaagaagccaaggcgttcatacaaaaaggaacgtttggatgctgagttgaggcttggaggaaaatatgggctccgatgtaagaaggagttggggggggttt

SEQ ID NO: 52845 - DNA, 423 bp, Gossypium hirsutum
  Clone ID: LIB3197-059-Q1-M1-H2
atttcttcaatggcttctctttcaggcttatgttcttcttttccatcggtgaagcctaataacagaatcggcggtgaactcagtccggttcgcaaagactcactcgcagtgtcgactcgttctaactcgagctttaaacactctgttgctcgtgaagtatctgctgatttgtcgaaaacgaatgatgtcgcgggtttgaagcaggctaagcaaggtggactcgagaaagatcctaaagcgctttggaggagatacgttgattggttgtaccagcataaggagctcgggttgtacctcgatgtgagtaggatcgggttctcggatgagttcgtttccgaaatggagccccggtttcaagccgcgtttaaggctatggaggaactggaaagaggcgccatcgccaatcctgatgaaggacggatg

SEQ ID NO: 52846 - DNA, 437 bp, Gossypium hirsutum
  Clone ID: LIB3197-059-Q1-M1-H3
cttgatacacgcccccatttattttatttttcaaacaaattttcccttcaattttcgtataatttcctaggaaaagaaatatgagagagtgcatttcagttcacatcggtcaggccggtattcaggtcggaaatgcttgctgggaactttactgtctcgagcatggcattcagcctgatggccaaatgccaagtgataagactgttggtggaggagacgatgctttcaacacctttttcagcgaaactggtgccgggaagcacgtccctcgcgccatctttgttgatctggagcctactgttatcgatgaagtgaggactggtacgtaccgccagttattccaccctgagcaactcatcagtggcaaagaagatgctgccaacaatttcgctcgtggccattatacaattggcaaagagattgttgatctctgcttg

SEQ ID NO: 52847 - DNA, 131 bp, Gossypium hirsutum
  unsure (1)..(131): unsure at all n locations; Clone ID: LIB3197-059-Q1-M1-H4
ggccgccctttttttttttttttttttttttttttttgttttttttttttttttttgttggttatncaaccccccaaaaaaaaattttttttacaaaaggcaaagcaaagcaaactgcttaatatgaatac

SEQ ID NO: 52848 - DNA, 434 bp, Gossypium hirsutum
  Clone ID: LIB3197-059-Q1-M1-H5
aaaaaaacgatgaattgagaggtggttcaacgttccctctttgaacttcagcttcaggtctgcaaactcaatagctgaaaggaaaaacatatttttacttgattcattcaaattcccacacgaaaagggggaaaacccagaaattttaagccatgaaacagttacacaggcaatcaagcattaaccataggcgagatgaagagatcttaatacctcagactcctgcgtagtcacccaagacgatgaaacacccgacatttgttcttagatccatgaagaatctatctatacagaaaaggcttaccaagcatcttcatcggcattttaatcggttctactttcttcatcctccaaccaactctctctcgtttaggcccaaccgagactcacccttcgatccccaaatctttctctaacaacgtcgtttcccacac

SEQ ID NO: 52849 - DNA, 391 bp, Gossypium hirsutum
  Clone ID: LIB3197-059-Q1-M1-H6
gagaaatgaatcaataatattatggactttgtgtctgggtcagctagtcaaaattttgggctcctgcaagaattctatcagaccactctaaaggcccttgaagaggcaaagaatgagagactttggtttaagacaaatcttaagctatgcaagatctggtttgatatgggtgagtatgggcgaatgagcaagattttgaaggaacttcataaatcttggcaaaaggaagatggaacagacgatcaaaagaagggaagtcagcttctggaagtatatgcaattgaaattcaaatgtataccgagacaaagaacaacaaaaagctcaagcaattataccagaaagcacttgctgtcaagtctgcaataccacatcctaggatcatgggaataa

SEQ ID NO: 52850 - DNA, 375 bp, Gossypium hirsutum
  Clone ID: LIB3197-059-Q1-M1-H7
ggacatatttctgaaaaccgataaaattgtagacgatcttttctacttcaaggacatgctttctgttggcgaatctcgtctaagtagagttgtcacccaaaaccttctgagtttacttatactccccttgttgcttccactactgaagttaggagagaataaaggtagctacaacatctcagcagtcacttctttgtacatagtttctcgccttcttcaagttgttggtggaaaacacttgataaatggagtggctggtcttcttttgtatcattatatggcattatgtcagagagatgctattgctacaaatggggatattgctggtagcataggtgatgcaagtcctcttctccactcgttgaatgatataaa

SEQ ID NO: 52851 - DNA, 395 bp, Gossypium hirsutum
  Clone ID: LIB3197-059-Q1-M1-H8
ctttgttcctcatcctctgatccgtctcttcccgcattcgtcccgccggatttaacaagttttcaaacgaaaaatgagggaaatccttcacgtacaaggcgggcaatgcgggaaccagatcggatccaagttctgggaagtggtttgcgacgagcacggcattgaccctaccggacgctataccggaaactccagtctacaattggagcgcgttaacgtttactacaatgaggcttcttgtggaaggtttgtcccacgcgccgtgctcatggatcttgagcccgggaccatggatagtgtgagaaccgggccttatggtcagatctttaggcccgataactttgtcttcggccaatctggagctggtaataattgggctaaggggcattatactg

SEQ ID NO: 52852 - DNA, 398 bp, Gossypium hirsutum
  Clone ID: LIB3197-059-Q1-M1-H9
cggacgcgtgggtccgagagtagtcatttttctttgcatcattgcatttttctctcgattgagcctctagggttttgaaagatacttaatatctttttttctttctctactacaatcgaatcgactctactagttttatcagatcttgaaatatccaagctgaactccttggctcgatcaaaacttgatcggattagtttcattcttgtctaatttcttttgagtaagaaagggaaaaaaatgccggcagtttacggagccagattgacgacgtttgaggattcacagaaagaaagtgaattctgttatgttcagaaggcgtcaggaccagtcggtgttgcagatggaatggctggtgctgccatgtatgaattagtacgcgttggtcatgacaatct

SEQ ID NO: 52853 - DNA, 155 bp, Gossypium hirsutum
  Clone ID: LIB3197-060-Q1-M1-A1
cgtccctcttctgtctctcctctctgcggatcagtttttctttcctctcctctcctctcatctcagttctctctcaccgtcgattccgctggttcttttccggatctgacccgtatcccgtgtcggcacaggtactgcaccccaaattgccgagt

SEQ ID NO: 52854 - DNA, 424 bp, Gossypium hirsutum
  Clone ID: LIB3197-060-Q1-M1-A10
cccacgcgtccggcaaaaaatggctcatcgtatagcgttttctgtgtgtgtcgtttcgtattttttattcatcggtttgatatcgtcggaggctttctcggtcgtcggatcagaagttgatccgttgatcaggcaagtaacggacggtcaagatgatggagtggagacacagcctttgaccgctgagcatcacttctcgctgttcaaggctcggttcaagaaatcgtacggctcggaggaggagcatgattaccggttcaaggttttccgggcgaacttgagacgagcggcgcgtcatcagaagcttgacccgtccgcgactcacggtgtgactcagttctccgatttgactcccggtgagttcaggaagaggtttttggggttaaggaggttgagactgcctaaagatgcgaaccaggcaccg

SEQ ID NO: 52855 - DNA, 444 bp, Gossypium hirsutum
  Clone ID: LIB3197-060-Q1-M1-A11
attgattggacgtagattcagtgatgcttctgtgtcagagtgacactaaattgtggccgttcaaggtcattcctgggcctggtgacaagccaatgatttgtgttacatacaagggtgaagagaagcaatttgctgctgaggagatctcttcaatggtgctcattaagatgcgtgaaattgctgaggcttaccttgggtctacaattaaaaacgccgtagttaccgtccctgcttacttcaatgactctcagcgtcaagcaacaaaggatgctggtgtcattgctggacttaatgtcatgcgtattatcaacgagcccacggctgctgccattgcttatggtctcgacaagaaagctaccagtgtcggcgaaaagaatgtcttgatctttgatcttggtggtggtacttttgatgtctctcttcttaccattgaagagggtatat

SEQ ID NO: 52856 - DNA, 407 bp, Gossypium hirsutum
  Clone ID: LIB3197-060-Q1-M1-A12
accgaagccattttagtagagcccagatctattttcaatgttgaagaagccattacatgaacctctccctgttttaaatcctcatctcgaagtttccgccatgaaagctgcttccttcaacactccccattttccgtccatcatcatgaaaagaacatcaacacagccatgtccaactcgattcgcaagaaccctttttcttaaactccctccgagcttccaaaacaatcccttttttagaccgtcggctaattcctctgcttcttctttttcctccgtttcttcttcctccaacgcattcatcgagtcaactgccaacggcacgtatttgggttggaacaaagctccggagattgagatcgatggtggtggacaagctaaggctatggggaacaaagacaaagtca

SEQ ID NO: 52857 - DNA, 394 bp, Gossypium hirsutum
  Clone ID: LIB3197-060-Q1-M1-A2
cccacgcgtccgctcttcagtccagtattctaaggtgcatttttttcccttcaactttccgtcactttcccgagaaaatgagagaaatcgttcacgttcaaggtggtcaatgcggcaaccaaattggagccaagttttgggaagttatctgcaccgaacatggaatcgactcaacgggtcgatacaacggcgactcggagcttcagctggagcgtatcaacgtttactataacgaaacaagttccagccgctttgttccccgcgccatcttaatggatctggaacccggtactatggacggcgtaagatccggcccgtttggacaaattttccgacccgataacttcgttttcgggcaatccggtgctggaaataattgggccaagggtcatta

SEQ ID NO: 52858 - DNA, 370 bp, Gossypium hirsutum
  Clone ID: LIB3197-060-Q1-M1-A3
caagacaaccaaggaataccgcagggtgtttttgatgtttggcattgtttcctttttcatcgttggcgtgatttgtacggagactttctcggcggagggatttgaagttgatccgttgatcgaacaagtaacggacggtcacgaaggagccgagccgcagctgctgacggcggagcatcacttctcgctgttcaagaagcggttcaagaattcgtacggatcacaagaggagcccgattttgggttcaagatttttcaggttaacctgagacgagcggcgcgtcattagaagcttgtcccttattggacttacggggtgactcagttctccgatttgactccaggcgagttcagaaaggcatatttggga

SEQ ID NO: 52859 - DNA, 217 bp, Gossypium hirsutum
  Clone ID: LIB3197-060-Q1-M1-A4
gtttttgaaaggggagactgtgttgatgaactctgcaatgctcgaggtgtcaacagctaaggaccttatatcaaaggatgctccatagatatgcttgttgctaccttacaatttgtattaaatatatggctttccatattcccatgattggatagttgtttgtgagttgtcaaagctttcatattgaaaaatcaaaataaagtttacaagttatttg

SEQ ID NO: 52860 - DNA, 448 bp, Gossypium hirsutum
  Clone ID: LIB3197-060-Q1-M1-A5
gtttccaatggatctgcccctgtagagaacaaacaaaaggaattgctggaggttgttattactgaagtattgaatggtggaaaattttacgtccaaacagttggagatcagagagtatcttctattcagaaacagcttgcatctttaaatatccaagaggctcctgtgattggtgcttttaatcctaagaagggcgacattgtccttgctcagtttagcatggataactcatggaatcgtgcactgattgtcaatgcacctcgaggaggagttcagtcttcaaatgacaggtttgaagtgttttatctcgattatggaaaccaagagttggttccctacagtcaattacggcctattgatgcttcattatcagcaacacctgggcttgctcagttatgcagtcttgcatttgtgaaagttccaagcctcgatgatgaaattggtactg

SEQ ID NO: 52861 - DNA, 214 bp, Gossypium hirsutum
  Clone ID: LIB3197-060-Q1-M1-A6
aattacaatagatctgacacctgtaaagagaaacaggttacaccacgagggagatcgaattagctgcagtgaaatgtggtccaacattcatctgatcggcatactaaacttcttaacatttttgctattagcagacatcctgggtgtgtgaatatgcgctaagcatgatgagcaacaacatcgatatgctaaaggtgttacagtggccattgat

SEQ ID NO: 52862 - DNA, 449 bp, Gossypium hirsutum
  Clone ID: LIB3197-060-Q1-M1-A7
tcgcccacagcgtccgctcttcagtccagtattctaaggcgcataaagaaaacccattttgtttggctcttcttttctgttccaaatcccgagatctctgaaacccatttcttcttttcacttgattcatccaattcctcatctgggtatcttcagttttctttttcaaactttatttgattagataaatctggtaaatgatgaataaaatcatgtctgcttattggatcttttctgcaagtgaagcttcctaggaattctctggttttttatttttattttttgggttttctctcctttgttgcatcatcagcaacatttctttatttcatccccaatttttaatgatttaatctccaccaaaacctcacaaatccagctcatttaacaagggatgttctcttagtcttattcatcaaatcacatttcaaaattcccatatttttctt

SEQ ID NO: 52863 - DNA, 438 bp, Gossypium hirsutum
  Clone ID: LIB3197-060-Q1-M1-A8
cccacgcgtccggacaacccaaatcttgtcttgtttgtttccgctgttaagctgtttctttcaccaaaaagatgtctgaatttacattggcttgcaagaagaaaaatgatgaagatcatgaattgtcaaggcttttggtgtccgattttatcctcttttgctcttccattttctctcaccctctctatttctcttatttcatcttcttctctccttatttcgtcaagcttctctcttttctttcgcctctcttctttaccactacccttttggttcttaccttgttcatccttgaccaatcagatgcctccatttgccacctcgaatccaagctactaacttccctacttactgcataccaaacactagttgaaacattaaggtgtgaagttgaggatgaaagtgatgggtttgggtgcttggaaccgctcgaaactt

SEQ ID NO: 52864 - DNA, 405 bp, Gossypium hirsutum
  unsure (1)..(405): unsure at all n locations; Clone ID: LIB3197-060-Q1-M1-A9
gaaccttgtataggaagttcaattttcccccactcattcaaacagaaatcaatcaatcacaccaacaaagatcattttctccggtgcccatatccggttaaaagcccggcggcacaggctagaaatttcaccttaccgatctgaacccgaccccaagaatttcgaaacctttaaccatcttatagtgtcactaatttacaggggtcaataaacccacttaaacaactacaacaatggacaacacctttagccaaagccctccatttgagaagctgtggcactaacctaacctaactaaatgcctattctttgcactctctttattttcttttctttctcttgcttatagntacttgatgcacaagttacggaatcattttggaccctttcgatttaattaccacc

SEQ ID NO: 52865 - DNA, 283 bp, Gossypium hirsutum
  Clone ID: LIB3197-060-Q1-M1-B1
cttgttataaatctgtcgcctagaaaatgaataatcatcacggatttacggagaagaagcccaacactaaaatcgtatgcaccttgggaccagcatcaataccggtccctatgatcgagaagctgttgatggccggcatgaacgtcgctcggtttaacttctctcatggatctcatgcctatcatcaggagactcttgataatctcaagtacgacatggtcaataccggtgttctgtgcgctgtcatgctcgataccaacggtgctgagatccgtactggctt

SEQ ID NO: 52866 - DNA, 434 bp, Gossypium hirsutum
  Clone ID: LIB3197-060-Q1-M1-B10
ctttggtccctttgggggtggattctttctttcaacaacagagatatcatcttctttgtttttctaaccaaaaaagaaacaccatgaaatgctatctgttctgtaaagatttgatcttgtttgtgtttcaactgtttgctttcttctacttagcttcagggaacttggcttctgagaaaagaatcctgttggagttcaaaagctctgtttttgatccttccggggttctttcaagctggaactcttcaaacaaccctaatcactgctcctggtttggagtttcatgcaattcaaggtctcaggtcatctccatcaccattcctggtggttgtcgtgaagtttctgaaggtaactttgctcaaccttgttcttgttcttcaaagctgtctaagttcccgttttatggttttggattgagaagaagtgcatgttct

SEQ ID NO: 52867 - DNA, 441 bp, Gossypium hirsutum
  Clone ID: LIB3197-060-Q1-M1-B11
aaaagaaaaacagaatccatgaagaaacagcgacgaatatcagaagaaggtgttggtggcaagaatccagtggccatcgcgccattcaagatgatgtctcaatcgagaaacggggtaagcaatctcgtctctggtagtttcaaaataaacccaatatttagatccctgtctcccagtgatcttccccacccaccaaccatcgttgtcgaaagcatccaccgagtccagataatggaaaacctgagtagcttttgtgaaggttactggaggtggcactggtcggacctcgtcggctgaaactatctcaaccagaggccgagtctgatcttcttcttcaaccaggttcttgtactgcactctataaagagtattgtcgttcaacggggataatatcttagcttggtagtaagaacccaagaacccttcttccttgctgcatac

SEQ ID NO: 52868 - DNA, 445 bp, Gossypium hirsutum
  Clone ID: LIB3197-060-Q1-M1-B12
cggacgcgtggggggagcagtaaaaatatcccctcaccaccgctactattattataccattactctactacagctgctatcattactacatacatgtccacccaaagtcgagcagttggcggcaccgagcacaactggtgccgagcggtggtcgggggaaccgggatagccgtcttggctatcatttcttccaaaaaccccgacgtttcacatcttaaaaatgccctccacaagctccaaatctcccatcccattcttaggtctcgcctccattacagtcctactgccaacagttactccttcgttacctccccctcccctttcattcaaatcaagtactttaaccattctacaacttgtcaaatccttgaaaacaaccaaaacatctcaccccttcatttgattctcgaacacgagcttaaccaaaacgcttgggttagttctt

SEQ ID NO: 52869 - DNA, 418 bp, Gossypium hirsutum
  Clone ID: LIB3197-060-Q1-M1-B2
aaaaaggaaagaaaaaaatgaagctcttgtttctaactttgctgctttgttctcttcttctatgttcttcagtttttgcaccaacaatggctcagcctcgttcacgtaagcaaacatatttttttcataatctaagccttgggtgtgtgtgtgtgtgttttaatctttgatgtaattttttttggggggggggaatggcagctttttgtgaagggaaatgcaaagggaggtgcaataaagcggcggtttgggatcggtgcttcaaatattgcggcatatgttgcgaggagtgtcaatgcgttccgtccggtacttacgggaacaaacacgagtgtccttgctacagagataaggtgaacaacaagggcaaacccaaatgcccttgaaaatgaaatatattcgagttcgggatttaatc

SEQ ID NO: 52870 - DNA, 430 bp, Gossypium hirsutum
  Clone ID: LIB3197-060-Q1-M1-B3
ctaaagatctcttccttctcacccatatcaaatattttctctaccacctcttaaagtttttccccagcgaaaaccactcaaatttcaaaccaattttctttttcttttttcattattttatatgcactaatattattttttagtgagttaaatcttagattaaatcagcaaaattttagcatctgataaacaaagcccagagaagaacagattttctgaatattagttaaacagtaatcgacagtgagaggcagagacgactaatcatactggtgtaaatttccaatccttttaagagagaaagagagagagatgaaatatagtttctcttggtgattcaatactttttgtgttcttcaattgatatcacttacatatttgtgggaatccgtgggctgaaccggctggggatgttgaattatgaaatatt

SEQ ID NO: 52871 - DNA, 312 bp, Gossypium hirsutum
  Clone ID: LIB3197-060-Q1-M1-B4
gtctggtatcactgccaatctgtggttttatcgataaccccgacgtgcgaagaggttgactatccggggctatttcacatggctacgataactgatcttatcctacggccagttaacccccctaccatgtacctgatcgcttccatcagctaaatccactccaaactctacaagaaatggatgtaaacaacaccggacactgtgctcaccttggacaattacaatgacttgactatgctatcactcttacctaactctgttaataatcatagacatactcagtgacaccgactcaacattaagcacgatgat

SEQ ID NO: 52872 - DNA, 450 bp, Gossypium hirsutum
  unsure (1)..(450): unsure at all n locations; Clone ID: LIB3197-060-Q1-M1-B5
gtgagatggcctgtgctcataatagcaattcttgcttctgtcgtgggaagccaagcaatcattagtggaacattctccataatcaatcagagccagtcacttagttgtttccctagagtgaaggtcattcacacctctgacaagatacatggccagatttatatccctgaaatcaattgggtgctcatgatcctctgcattgctgtgactattggctttagagacacaaaacacatggggaatgcatcangattggcagtgatgactgtgatgttggtgacgacatgtctcacatccctggttattatcctctgttggcacaaaccccctattagggctcttttctttcttcttttcttcggctctatagagatgctatacttctcaacttgactcaccaagttcactgaaggggcttggctccctattctcttggcccttttccttatg

SEQ ID NO: 52873 - DNA, 105 bp, Gossypium hirsutum
  Clone ID: LIB3197-060-Q1-M1-B6
cgccattggaagagggaaaagaaaacgaaacccaaagaaaggacataatgagcgggtctttgcgtaggttcccttccatcacccgcctgtcacaaaagcaaccgg

SEQ ID NO: 52874 - DNA, 432 bp, Gossypium hirsutum
  Clone ID: LIB3197-060-Q1-M1-B7
caaaaagggggaaaaaatcactgaacccaacagaaagctaaaacttattactaataatttcaaagaaaaaggagcgtcatcatcgaagcggaagcgggattcgcggtggtaactatactgcgatgccttgttctttgatcgagactagcaataatttttgtggtggcggtgacggaggtgatgtgaatgggcgtattcacaatttcaagctgaacgagcacactttcttagcttctctgatgccgaagaaggagattggcgccgatcgcttcattgaagctcatcctcattacgacggtcgcggcgccgtcatcgcaatctttgattctggtgttgaccctgctgcttctggcttgcaactgacatcagatgggaagccaaagatcttagatgttattgactgtacccggagtggagatgttgatacctcaa

SEQ ID NO: 52875 - DNA, 439 bp, Gossypium hirsutum
  unsure (1)..(439): unsure at all n locations; Clone ID: LIB3197-060-Q1-M1-B8
agcattagccttccactaatatcttccatctctctttgagttctccaacacatcagatcatggtgttatctaagacagcatctgaaactgatgtctcagttcactccacttttgcctctcgttatgtccgaacctcactgcccaggttcaaaatgccagaaaactccataccaaaagaggctgcgtatcagatcatcaatgatgaactgatgcttgatggcaacccaaggttgaaccttgcctcttttgttactacatggatggagcctgaatgtgataagcttataatggactccattaacaagaactacgttgacatggatgaataccctgtcaccactgagcttcagaatcgttgtgtgaacattatagcacatcttttcaacgcaccattgngagagtcagaggcagcagttggtgtgggaacagttgggtcatc

SEQ ID NO: 52876 - DNA, 423 bp, Gossypium hirsutum
  Clone ID: LIB3197-060-Q1-M1-B9
aagaagcatccctttataccccactttaagttactcaaaatttgcgtacttttattttttgcatggcagtaagtctattgtcacatgagttgtctgacctgtgtcttgggaagccagcactaaggtcactttccatcacatccaccattgctgaagctcttgaggtcttgaaaacctctgatgacaactttgttagtatctggaattgtgatgatgttgagtgttgtagtagatgtgtaggcaaagtttgcattgtggatgtgatttgttatctttgcaaagatgaaaatttggtatcaccttcaattgctttgaaacaaccagtttctgtacttttacctaagatccctggtcttattatccatgtggaaccatcttgcagcttgttagaagcaattgatcttatacttgaaggagcacaaa

SEQ ID NO: 52877 - DNA, 410 bp, Gossypium hirsutum
  Clone ID: LIB3197-060-Q1-M1-C1
aaaaacccatacgagttttcgtatataaacccggcgagttaacccggttcattaggtgactcagctaccactcagtcccaacgcaaaagaaaagaaaaggaaaaatagaaagaaagatgcaagtcctttcgaacgctcgcaatctcgctagggttttaggatctcgaacaattcttttcaattctaatcaactttacctctcatctttgattcaatctcctagctcttctcttcaatgccaacttcacagtgacgcttcctcagggattaatggaagctggtattatccaatgcctctgcattcaatttatccgatgatttcaaggacatttttttcgacagaagctggaacagttaatagcaatccaactgaggcagttaaggaactctatgatgacatgcttcaatct

SEQ ID NO: 52878 - DNA, 440 bp, Gossypium hirsutum
  Clone ID: LIB3197-060-Q1-M1-C10
gctgactttcacatacatttggatcattctttggtcacactttggttatataattgtgatagtataatatggagaaatggtatggggtttcagggctggtgttggttttgagtttgttctttggggttaaaggagaaccccaagtcccatgttacttcatttttggagattcattggtagataatgggaacaataatgaacttcgttcattggctagagctgattacttgccttatgggattgactttgctaatggaccgaccggccggttttcgaacggtcgaactacggtggatgtcatagctgaacttttggggtttgacgattacatccctccatactcaactgcaagtggtagacaaatactgtgaggagttaactatgcatctgctgctgctggaatcagagaagaaactggacaacaactgggagctcggatt

SEQ ID NO: 52879 - DNA, 422 bp, Gossypium hirsutum
  Clone ID: LIB3197-060-Q1-M1-C11
gcaagttctgcaaatcaggtaagactaacctatgcggcaaagttaggacagccactggagctggagtcatgatgaatgatcgcaagagccgcttctcaattaatgggaaacctatctaccacttcatgggcacctcaacatttagccagtacacggttgtacatgatgttagtgttgcaaagattgatccacaggctcctttggacaaagtgtgccttcttggttgtggtgttccaactggacttggagcagtttggaacacagccaaagttgaaccaggggccattgttgctatttttggccttgggactgttggtcttgctgtcgcagagggtgcaaagtcagctggtgcttcaagaataattggcgttgatattgatagcaaaaagtttgatgtagcaaagaattttggagttacagag

SEQ ID NO: 52880 - DNA, 440 bp, Gossypium hirsutum
  unsure (1)..(440): unsure at all n locations; Clone ID: LIB3197-060-Q1-M1-C12
attttgacttcgaaaaacatcgggtacggtatatacatcccatgtcaattcagttgaattctcaccgattctattctcctcagtcaagaagaacaagaagatggagagaactctaacccgctcattaatcgctgttgtaatctcttccttagccgcgattcgatcctacagaaggaagtctctcgatttatctggagctcttgccggatttctcgttatgactattcatttcgttgtcggatacaggttcggggcaatgttgcttgcctttttctttacttcatcgatgcttaccaaagttggagaagacaagaagcgacgagttgatgctgattttaaggaaggtggacaaagagactggatacaagttttatacaatagtggtattgcagcagttntgtctgttcttattgggaacctgactggatgggaggacaagt

SEQ ID NO: 52881 - DNA, 439 bp, Gossypium hirsutum
  unsure (1)..(439): unsure at all n locations; Clone ID: LIB3197-060-Q1-M1-C2
aagcctctcgtctcctctccataaatctctcactcaacgcanagcgaataggcggagacttccaagaatctatcgcatcagctaatcacgctctaaagaatggatcaggttcaacacccatctatcatgcagaaggtagcaggccagctccttcgttctagccattctcaagattttcaagggtataatgggtctttcaggagtcctgctctataccaaaggcgtgctgcatatggcaattactccaatgctgctctgcagcatcctgtccgggcttttggagacctgtctatggttccatcaacagcttctgctatttgcgttcaggctcctgctgagaaaggatttagcggctttgctattgatttcctcatgggtggagtttctgctgctgtatcaaaaacagctgctgcaccaattgagcgtgtaagcttttgat

SEQ ID NO: 52882 - DNA, 396 bp, Gossypium hirsutum
  Clone ID: LIB3197-060-Q1-M1-C3
taatcttcagtttttgccttcccaccggcttaacaccgcctttcagttttcatttcctctaagaaaaggattaaaatggcgaagaatatgatgcgagccgttcaatacagtaaatataacggaggcgccgctgatctcaagcatgttgaagttccggttcccagtccaaaaaaggatgaagttttgatcaaagtagaggcagctagtattaacccaatcgactggaaaatacaggagggggtagcgcgcccatttttacctcgcaaattcccccacattcctggtaccgatgtagcaggagaaatcgtacaagttggatcaggtgtccagagtttcaaagtcggggatacagttgttgccgtacttggtaatggaggtgcactagctgaatatgct

SEQ ID NO: 52883 - DNA, 442 bp, Gossypium hirsutum
  Clone ID: LIB3197-060-Q1-M1-C4
ggaaattatgatgaagctcttgatttagaagccgttgtttgcaaactctcaaccatgcaccccaatatacctgttattcaagcattggctcaagaagttaggcaaacaacacaatctcttctctctcagcttctccaaaagcttcgttcaaatattcagttaccagaatgccttcggattattggatatttacgccgaataggagtatttagtgagtatgaaatgcggttgcagtttttgagatgccgagagacgtggctcactggaattcttgaggacttggatcagagaaacgcgtatgagtatctaaaagggatgataagctgtcacagaatgcatcttttcgatgttgttaaccaatatcgagcaatatttgctgatgatacatctggaagtgaagaaaattatgatggcgggcttctttttagttgggccatgcatc

SEQ ID NO: 52884 - DNA, 450 bp, Gossypium hirsutum
  Clone ID: LIB3197-060-Q1-M1-C5
cggacgcgtgggggtcaaccaaaaacctttgtcttctgtgccgatgaatccacaacaacccaatccatcggaacccgaccttcaggttccatccctcgcttccctccgaatccagccctcttccccacgtttccctttctctacccccatcgccggttctcagcgtcgcatcgccatcgccgttgacttaagcgacgagagtgcttatgccgtccgctgggctgtccagaattaccttcgtccgggagacgccgtcgtcctcctccacgtacgtccgacttccgtcctttacggagccgactggggctctatcaaactccaaattacccccaactccacgaataatcacgaaaacgccaccgccatcagcggcgatcactccgacgaagagtcgcagcagaaactcgagaacgacttcgacgttttcacgacaaccaaaagcgaacacgc

SEQ ID NO: 52885 - DNA, 391 bp, Gossypium hirsutum
  Clone ID: LIB3197-060-Q1-M1-C6
cacccctggtgcaaccacatcaggtttgagaatctcaagtgtgaggaaatttggtcctctagatgaaaatgctgccaccactggtgatggcctaacacccaatctggtacctaaaaaggctagagttgcggttggtttcccatttgttaaagcataatgtttgattgctttcccttccatctctcccactgcaactgctggaagtaggtgacaatctgcaacaagctcctacccatttgctgcagtgtttgtcaaaatcatccctactcctccagcatctttcactacttgacccttttgcactctatgatttattcctcgatcacatatcacgattttcccagaaacaacatgtggatccaaagttccctctaagcataatgaacttgga

SEQ ID NO: 52886 - DNA, 432 bp, Gossypium hirsutum
  Clone ID: LIB3197-060-Q1-M1-C7
cattagtgacatgaacctagctgatgcaatggcgtagggccaaggttttcgacattgatctgcaaaagcaactgagaccctacatggaatccatggtcccactccctggaatctacgatcctgatttcattgctgctaaccaaggtgaacgtgccaataatgtcatgaaggggaccaagaaagaacaagttcagcaggtcatcaaagacatcagggagttcaaagagaaaaacaaggtggacaaggttgttgtactctggactgcaaacactgagaggtacagcaatgtcattgtggggctaaatgacaccgtggaaagccttatggcttctttggagaagaatgaatcagagatttctccttccactttgtatgctattgcttgtgttcttgaaaatgttcctttcatcaatggcagcccacaaaacacct

SEQ ID NO: 52887 - DNA, 429 bp, Gossypium hirsutum
  Clone ID: LIB3197-060-Q1-M1-C8
cccacgcgtccggtaccttggccgactacaacatccagaaggagtcaactctccaccttgtccttcgtttgcgcggcgggatgcaaatcttcgttaagacgcttaccggaaagacgatcactctcgaggtcgagagctctgacacgatcgacaacgtgaaagccaaaatccaagacaaggaaggcatcccgccagaccagcaacgtctcatcttcgccggaaagcaactcgaggacgggcggactttagccgattacaatatccagaaggaatcgactcttcatctggttctacgtcttcgaggtgggatgcagatcttcgtcaagactttgaccggtaagaccattactttagaagtggagagctcggatacgattgataacgtgaaagcgaagattcaggacaaagaaggaattccaccagatcagc

SEQ ID NO: 52888 - DNA, 384 bp, Gossypium hirsutum
  Clone ID: LIB3197-060-Q1-M1-C9
gcggaggagtggatcgcagtgtggagtgtacagggagcgtccaagccatgatttccgcttttgaatgcgtccatgatggttggggtgtttgtgtgctggtgggtgtgccaaagaaagacgatgcattcaaaactcatccaatgaatctactaagtgagaggacccttaagggtgctttttatggcaactataaaccacgcactgatattcctatggttgtcgacaaatatttgaacaaggagctggggctggatatggacaagttcatcacacactctgtgccttttgccgatataaacaaggcattcgactacatgctccagggtataggtctgagatgcatgattcatttggatgcttaagagagtgttgctgctgtatatt

SEQ ID NO: 52889 - DNA, 144 bp, Gossypium hirsutum
  Clone ID: LIB3197-060-Q1-M1-D1
agacaatgtcatggctatattccaagacaaaggagggatccattctgaccaggaagggctcatctttgcctgtaaacacctcgcggatgggcgtactctttccgactaccatactcaaaatgagttcacccttcacctagtact

SEQ ID NO: 52890 - DNA, 154 bp, Gossypium hirsutum
  Clone ID: LIB3197-060-Q1-M1-D10
cccacgcgtccgctttgatttgccccataaaatgttttagaggctctctttgttggttcatggaatttgctgctaacaaagaaaaggtacaacccttattttcctttattagcagcaaattccatgaaaataagggttgtaccttttctttgtt

SEQ ID NO: 52891 - DNA, 430 bp, Gossypium hirsutum
  Clone ID: LIB3197-060-Q1-M1-D11
ggtcaaccaacttgggagtcaggaacatcgggagttggcaagggaagctgtgaggagaagtcttgtcctactgaagaatggcgagtctgccgacaagccattgttaccccttccaaagaaagcaactaagatactagttgctggaactcatgccgataacttgggctatcagtgtggaggctggaccattacatggcagggtcttggtggcaacgatctcacaactggtacgactatcctccaggctgtcaaaaatacagttgattcaagtactcaagttgtatacagtgagaacccggatgcagggtttgtcaagtctggcgaattctcttattccattgtggttgtgggagaacccccgtacgcagaaacatatggtgacagcctgaatcttacaatatcagagcccggtcccatgactatttacaat

SEQ ID NO: 52892 - DNA, 435 bp, Gossypium hirsutum
  Clone ID: LIB3197-060-Q1-M1-D12
gaacattcgaaaagttctcattatcctaatcagttcttgtttgactatgtatttggctttttgaaatattttgacaggcatttttggcattacaaaagttcaaaagtcatcagctatcttttatcttaaactataatcttgtattcttttttccttggatattacagttaatgtttgcctgtttttctggtcaaatttacttgctagtgctgattgtttttgaaaccaatagtactcttatttgttgcatttatttaattccttgctgttggttgcattactaccaaggctgcctgacattttcatacatgtgttccaatttctccttttcttttctttcaagttctggacctaagtgtaagttcctacaagaggaacaagcagatccttccacagaccactcataatcttctgttggaacggcgacttatacca

SEQ ID NO: 52893 - DNA, 368 bp, Gossypium hirsutum
  Clone ID: LIB3197-060-Q1-M1-D2
cccaaatttgcagcataaggtctttaggtttttttaaatttgatggcggatcggacctcagctgctccaaagcctatatggatgaaacaagctgaagaggccaagctgaaaagtgaggctgaaaaagctgccgctgctaaagcggctttcgaagccacattcaaagatgttgataagggccgtaacaaggatgtggtggcagcttcatcggatagtgagtctgaggacaccaatgacttggtggacaaaccggttggatctgtggatcctgctaagtgcatggcagcaggaccaggaatagctggtggcacggcatgtgcagcctccacctttatggtggtaacaaaggatgcaaatgggaggaaagt

SEQ ID NO: 52894 - DNA, 334 bp, Gossypium hirsutum
  Clone ID: LIB3197-060-Q1-M1-D3
ttttattttttctttttttttttcccacactttgtttaaaacccattagctaaaaatgcactgggttctttctgtgttgcttgcagttatcggagttactgcactgctcgttgtaactccggtaagtgggtaccgtccatggccgtacgtaaaacccaacagctccgacttaatgttcggaggctctaagaaatttgagggctcatcggagtttgtacatatgagatatcatatgggtccagtccttactggtcatatcaccatccacccaatctggtacggccggtggcagaaatcacagaagaaaatcatccgtgagttcatcaactcgatc

SEQ ID NO: 52895 - DNA, 451 bp, Gossypium hirsutum
  Clone ID: LIB3197-060-Q1-M1-D4
acgcgataaaaactagtgtcggggattttagggtttcgtaagaaataatatcgtcgatgagcaacgaaggagttaacttcaacatgtccggtcttggcgatgctcttaacgccgaagcacgagctggtctcgttaacgctctcaagaataaacttcaaagtcttgctggggatcactccgatgtgctggagagtctatcaccgattgtcaggaagcgtgtcgaggttcttagggagatccagagccaacatgatgaattggaggctaagttttttgaggagagggcagcacttgaagctaaatatcaaaaactatatcaacccttgtatgctaagcgatatgatattgtgaatggccttgctgatgctgaaggaacagcaaatgaagctgccaaggaccaaggagaggaaaaggatgctgaagagaaaggggtgcctgattttggcttact

SEQ ID NO: 52896 - DNA, 455 bp, Gossypium hirsutum
  Clone ID: LIB3197-060-Q1-M1-D5
cccacgcgtccgcggacgcgtgggtttttttttccccttcggagtttgcttttttgcagatcaaggaagaaagttatggcagaagaagaaactgaactgagcgacaagcaaaagaaagagatcgccaaatggttcctcctcaatgctcccgcaggcgaaatccagtacgttgccaaagatttaaaatccgttttgaataatgatgacgtctacgatgaggcggcatcggaagcatttcctgtttataacaaatctcacatgatttgcctcgaaatgcctggtagattcggagatgtgctggttacatcatatggggagcttcagggtaatgagtatctagaccccaagactgcccaagttgctatagttgaccatgtcaaacaggtttgtacagaggttagacctgccactgatgaggaacttcccactccatatgttgaggaataccgatgtgc

SEQ ID NO: 52897 - DNA, 338 bp, Gossypium hirsutum
  Clone ID: LIB3197-060-Q1-M1-D6
gttgaaaaaatatgggtttccaaagaaacatattgggtttccttttcttgatattggcttcactaacaagcctctcttctagccttcctagtgaatactccatagtggaacatgagattgacgcatttctttcggaggaaagggtgttggagatcttccaacagtggaaagaaaagcatcggaaagtgtaccggcacgccgaggaggctgagaaaaggtttgaaaatttcaaggggaatttgaagtatatcctagagaggaatgcaaagagaaaagcaaacaaatgggaacatcatgtgggattgaacaagtttgctgatatgagcaatgaggagttc

SEQ ID NO: 52898 - DNA, 435 bp, Gossypium hirsutum
  Clone ID: LIB3197-060-Q1-M1-D7
gttgggaaaatttcagaaatctgaaaaagcgaaggagagaaatggcgagcggagggaaagtgtcttttaaagtcactcttacctctgatcctaagctccctttcaaagtgtttagcgtgcctgaagcagccccttttacagccgtcttgaaattcgcagccgaggaattcaaagtccctcctcaaaccagtgctatcatcaccaatgatggcgtgggaatcaatcctcagcaaagtgcaggaaatgtgttcctcaaacatggatcggaacttcgcttgattccccgtgacagggtgggagccttttgaaataacaaaaacttcatttgttatctctgagtgagaagactggttatgactttgtttggttatggatcctttgtttggtatgtatgtttaaacttttacttgatgtagaacatgacggatagcaact

SEQ ID NO: 52899 - DNA, 416 bp, Gossypium hirsutum
  Clone ID: LIB3197-060-Q1-M1-D8
caataattctctttctgtttctctggtttaaacatgggtatgggtttaaggaatggatttcttttgattttatcttgtgttgttacactttccctctcagttttggggcgacctgccactttccttgaagattttagaatcacttggtctgattctcatattaggcaaatcgatggagggagagccatccaacttgttctcgaccaaaattcaggctgtggatttgcttctaaaaggcagtatttgttcggacgtgtcagcatgaaaatcaagctcatccccggcgactccgccggaacagtcaccgccttttatatgaattctgttacagatgctgtgcgagatgagctagacttcgagttcttgggaaaccgtaccgggcagccatatacggttcaaaccaatatctatgccca

SEQ ID NO: 52900 - DNA, 350 bp, Gossypium hirsutum
  Clone ID: LIB3197-060-Q1-M1-D9
gtcataaccattgagaactcacgttcagatgagaagctcctgtcagtcttccgtgaaggagtgaagtacggtgctggaattggacccggtgtctatgacatccactctcccagaataccatcaaccgaagagattgctgacagaattaacaagatgcttgccgtgctcgagaccaacatcttgtgggttaaccctgactgtgggctcaagactcgcaagtacgctgaggtgaaaccagccctgagcaacatggttgctgctgccaagctgctccgcacccaactcgccagcgccaagtgataggctcccgagatattggaaatccgaatcccataccattccagagagat

SEQ ID NO: 52901 - DNA, 387 bp, Gossypium hirsutum
  Clone ID: LIB3197-060-Q1-M1-E1
cccacgcgtccgcgagggcgtggaggttcagctggtaacaagtttaggatgtcactgggtctgccagtggcggctacagtgaactgtgctgataacactggcgctaagaacttatacatcatttcggtgaagggaatcaagggccgtcttaaccgattgccatcagcttgtgttggagatatggtaatggctactgtcaagaaagggaagcctgatcttaggaagaaggtcttgccttctgtcattgtgagacagcgcaagccctggcgcagaaaggatggtgtttacatgtactttgaagataatgctggtgtcattgtgaacccaaagggagaaatgaaaggttctgctataactggtccaattggaaaagagtgtgctgatcta

SEQ ID NO: 52902 - DNA, 443 bp, Gossypium hirsutum
  Clone ID: LIB3197-060-Q1-M1-E10
cgcacactgaaacacagcgttttccatttccgttcacggcatgatcttcgagaaccattcccaaaatttagaccccaaaatgcgaaaacccaaaccctgaactcactgttttttttcccctttatagtactactgtcttgatctcttatatatatatattttctctcatggcggaggaggtcatctctggtagtggatcttcgggaagagaaggagagatcgatataagagtaggattaacctcgagggattcgttagattctcggtgggtgttcccaggtgaagacgactctgagatcgaagaaaatggcgacggcgacgatgatttaccgcatcgagctgcggtggactccgaagacgaggataatcaggaacaccatttgatccgcactgaaccacgcgtggattcctttgacgtcgaagcactcgaagtccatggcgca

SEQ ID NO: 52903 - DNA, 444 bp, Gossypium hirsutum
  Clone ID: LIB3197-060-Q1-M1-E11
gcaatcctttcctttacactctaccctcactatcatccctcctttcttatttttccctttttggttcctctctttctgtccttactttgtgatggaattaggaagtgctcttcagttccttgataacaaatccattctagtcactggtggaactgggtttttggcaaagatatttgtggagaaaatattaagagttcaacccaatgtcaagaaattatatcttctcgtaagagcagccgaccataaatccgccatccatcgtttgcaccatgagatcgtagggaaggatctgttcagaaatctgaaaaagaaatgtgggaccaatttcagctcttttatatcacaaaaaattacagttataccaggtgacttaacccatcaagatttgggtctccatgattctgatttgcttcaactcctttgcaaggaactcgatgttcttct

SEQ ID NO: 52904 - DNA, 448 bp, Gossypium hirsutum
  Clone ID: LIB3197-060-Q1-M1-E2
ataccaaacactcttgctccatatatctgcctctctttctttctttacaattctcaggtttctgttctttgaatcctgctttcaagatcataatagaaacaaagaaaggcaaagcttagaagatgggatcaggtgaatggtgccttcaaaaacgagatagtttcaagagtgaaacgcttgtaggcaatgagactgtgccagaaattgggtgcctttcgattattgttcttggtgcctctggtgatcttgccaagaagaagactttccctgctctctttcatctttattgccagggatttctgccaccaaatgaggtgcacattttcggctatgcaaggactaagatttcagatgacgaattgagaaatcgcatacgtggatatcttgtgagtgaaaggagtgcttcaccatcaaaagatgtatcaaagttcttacagctgattaaata

SEQ ID NO: 52905 - DNA, 383 bp, Gossypium hirsutum
  Clone ID: LIB3197-060-Q1-M1-E3
tcgaccacgcgtccgatggcgaagggttttgcttaaggtaagtggagaagcactagcgggagatcactcgcaaaatattgacccaaaggttacgacagctattgctatggacgattcatcaatgacacccctgggcatgtaaggtgcaattgaagctgtgggggtaatattattcgcggatcctctcgggcatgatgtagtggacttgaccgttcatctgctgattacatcggaatgttagcaactgtaatgaatgctatatttcttcaagcaacaatggagagtatcggcatcccaacacgtgtccagactgcatttcgtatgtcagaggttgcagaaccatatatacgtagaagggcagtgaggcatttgagaaagggagg

SEQ ID NO: 52906 - DNA, 454 bp, Gossypium hirsutum
  Clone ID: LIB3197-060-Q1-M1-E4
ggagcagtaaaaatatcccctcaccaccgctactattattataccattactctactacagctgctatcattactacatacatgtccacccaaagtcgagcagttggcggcaccgagcacaactggtgccgagcggtggtcgggggaaccgggatagccgtcttggctatcatttcttccaaaaaccccgacgtttcacatcttaaaaatgccctccacaagctccaaatctcccatcccattcttaggtctcgcctccattacagtcctactgccaacagttactccttcgttacctccccctcccctttcattcaaatcaagtactttaaccattctacaacttgtcaaatccttgaaaacaaccaaaacatctcaccccttcatttgattctcgaacacgagcttaaccaaaacgctggggttagttcttcatgtaccaccaaacacgacgt

SEQ ID NO: 52907 - DNA, 341 bp, Gossypium hirsutum
  Clone ID: LIB3197-060-Q1-M1-E5
ctctttctaagttactctgccttcttctccttgagaactacatcgcgatctatgaatctcattcttgtgcacataacaatgccaccaaagctcaatctcatatcataccagaagaagctcatttgcctctgtatcatgagtcgctatgtacatatatgcgcggagatgcatagcaggctaactcgtgaaggacttcaaccctgaacatctcagtagtatcaacctcaggctagtcacatggagcaatgctcagtatgtgaaacctaataagaccatcatttggcagcacgtggaagatgaatgttaccttaacactatacatgcctgcgccatcagcatat

SEQ ID NO: 52908 - DNA, 365 bp, Gossypium hirsutum
  unsure (1)..(365): unsure at all n locations; Clone ID: LIB3197-060-Q1-M1-E6
cctccccctccccctccccctcggccccgttcgactctcatcacctctgccccaacacgttggggactcaggctcacggcgtttcagagaattcttttgaatttctcctttttattgatcttataattttttgtttagtttttgaagccgaagagggatgggatcggagctaatatacagaggccatgagactcagcttgcttcagattcctattcacctaaaccggttaaaccatgggcctctgtcacgcgcgtggtccggtacatgctccgggagcagcgcctnctctttgtgctcgtaggcattgccatagccactctggtcttcaacatcttcccggcctcgcgtgctgcgcacgggcccc

SEQ ID NO: 52909 - DNA, 439 bp, Gossypium hirsutum
  Clone ID: LIB3197-060-Q1-M1-E7
caagactcttgccaatttctgttactctgtacatctctctgtctctgtttcttactaaatccttcttcacaaaatcgaaaaaatagaaaaagaaaaaactaacaacaaattctagaacagaaggagtgctgatttttcaacaattaaaaagttagagagaagaaaagccagggacaggcacctcctcctggctactttgttcgactagaaaattccgacaatttgtatttgaagaaacgaacaagaatgcgtcgatggctttgctgttcgtgtctggttgaggatacttaccaatcacatgaaaatgagcacttgaggagccccaactataatacagaagggaatcaaaagaactcaaaggcggcagcccctcccaaggccgaagtgcaaaaatcagcaccacctatcgaagtgcctgcattatcattggaagaattga

SEQ ID NO: 52910 - DNA, 408 bp, Gossypium hirsutum
  Clone ID: LIB3197-060-Q1-M1-E8
tgccgaatgtctttgcttgggatttgttaaaatgcactagcgggtgctcgctaggtattgatatccccagatgttacaacagctgctgatatttactaggggaggattaatcctctggacatgtaaagaacttgggaatgctcttaaaggatcaccaattgacaccttgatccggtcttgtcttttggaggaacgctctggtgcagcatcatataactatgatgccccaggtgcttcttataccctcaagtggaccttccataatgagcttggccttgtatttgttgctgtttatcagcgtattctccatcttttgtatgtggatgatcttcttgcactggtcaggcgtgagttctctgagatttatgatccgaaaggactgtttataatgattttgacgaaactttt

SEQ ID NO: 52911 - DNA, 227 bp, Gossypium hirsutum
  Clone ID: LIB3197-060-Q1-M1-E9
cccacacgttcggtctttatgtacactttttcgattctcaagatggggtaatctgcgaaaagtattcgcaaaggggagtccaacaggcagcgcatggattgcagcacatgctgttggagcgtgacaagcatttgtcaaccatggactatgctgatggaactacactgatgcgtgagatgtacatcatgccatgaaccatactagatcaggtcctgaaggcatgaacc

SEQ ID NO: 52912 - DNA, 425 bp, Gossypium hirsutum
  unsure (1)..(425): unsure at all n locations; Clone ID: LIB3197-060-Q1-M1-F10
gttatcagcaaggttgctaccgagaagaatcctgcagatatgttaactaaggtgagccctgcatataagttcaagcattgcttggacttgataggtattcgggattgattagcgccagagaggcgtttggaagaggtgatccagttcgaggaattcactatgatgttcagcttggtaaatttcaagccaaggtggagatttgttaagaaatggcttaaaattggtagtggattgttgttgttggtagtgggttgttggtggtagtggattantggatggttgttggtgtccattttcaaccacaaatctttgccaaagttgtggacaattatgtccttgaactctcttataaacagagaggttcattagccatattcatcatgccaaaccaagagagagcacagcttgttctttgaaagctagga

SEQ ID NO: 52913 - DNA, 296 bp, Gossypium hirsutum
  unsure (1)..(296): unsure at all n locations; Clone ID: LIB3197-060-Q1-M1-F11
attggttcatgtttcttttcactcttcctattgctgcttatcatctcatgttgtacttgaatcanaagcatcttcttgatgttactgagattttcagagatcttaatactgagaagaaatattcgttttatcaagttggccgtttacttattgctcttcactgtagttttgttcaggctagtgataactgcgttcaactctttacatgatgaagttgatgtgcatgcattttgattacttggcagtgtggtagttggtatttgtaagtctgtgttgaaagtgaaacctacctaact

SEQ ID NO: 52914 - DNA, 426 bp, Gossypium hirsutum
  Clone ID: LIB3197-060-Q1-M1-F12
attgcttcctgagtggtacaatgaaaaaggaattcagttgatccttagcactgaaatagtgaaagcagatcttcctgccaagactctagtaagcgcagctggagaaacgttcaaatatcaaattttgatcattgcaactggttccacagttataaggttgacagattttggcgtggaaggagctgatgccaaaaacatcttttacctgagagaaattgatgatgctgataagttgctggaagcaatcaaagcaaagaagaatggaaaggctgttattgttggaggaggctatattggtcttgagcttgctgcagtgatgaaaattaaccattttgatgtcaccatggtgtaccctgagccttggtgcatgccccggctttttactccggacattgctgcgttctacgaggagtattatgctaataa

SEQ ID NO: 52915 - DNA, 407 bp, Gossypium hirsutum
  Clone ID: LIB3197-060-Q1-M1-F2
gtgcagtgaagcaacaggatgaagtatttgcgggtatgtcgatgccgccaccgatgcctgccggcatcgctgcttctggtggtggggtgggcttgaatccgggagtggttcctggggagtatttgaatcggggtctttccgatgatgagagatcggatcatggggttcctgtgggatataggaaaacacaaactccagtgattcagcctcagggtttacctcttcagaatcaacagaagtatagcagtggtcaagatttggcttctccagattccatctcaagtgacggtagttttacaaatccattatcacgccaaaagcctgtgatttatcaagacccagttgttcaaatcccatctggggttaacaggattcctgcaaacactgtcgatccaaagcttaatatc

SEQ ID NO: 52916 - DNA, 449 bp, Gossypium hirsutum
  Clone ID: LIB3197-060-Q1-M1-F3
gcagagctccaaaaacaaatcacttccttcaaaaagaattcaccttttcttttttaccatagcctttttgtatataataagttaacctactgatgaaaatataaactaaaaatcctcgtttgtctccaatctctgattcccatttgcctcctctctctcttacttttatttttttcccttatttgattcctcttttttcacattcaggattccttcttttgactcgcttatttcaagttttctttccttgggttcatttaaattcgtttgttttgaaaattttgaagtgaatgaaagaaaaaaaaaaacatgggtggtgttaacaaggtggaagtgataaacagcaaaggttgttcaaagttgtttgttgggttctcatcttcggtgccatcatttagaagtttccaatcgtttgaaccaatgtcccctgcttctacttctcttgggtc

SEQ ID NO: 52917 - DNA, 444 bp, Gossypium hirsutum
  unsure (1)..(444): unsure at all n locations; Clone ID: LIB3197-060-Q1-M1-F4
aacccccaaaaatccatcgccaccaggaggaaaaaagcaaaagaaccctaccgacgatgttccggcaagcgtcacgcctcttggctcgaactaccaccccatggaggggaagtcgagcattttcgtcagatgtaccagccacacccgctcaagattcgagcttcatcgaatcatggtccaaagtcatacccaacttagaccctcccaagacaccatcttctttcatgacccctcgccccgccaccccttctgctatcccttctaaactcaccgttaactttgttcttccttatgcatctgagctctccgctaaagaggttgacatggtaatagttccagcaacaactggacagatgggtattttgcctggacatgtccctacaattgctgaactgaaacctgngatcttgtcggtgcatgaaggaaatgatgtcacaaaatatt

SEQ ID NO: 52918 - DNA, 451 bp, Gossypium hirsutum
  Clone ID: LIB3197-060-Q1-M1-F5
cccacgcgtccggtggcgatgatggtgggttcgatcgcatcggctgagatttcattagcatccaccgggcctgcttttctatgggctcctggtttctctagcgttgaatcgaaggaatctgtaaattatcagatcaagtctccaaaggatctagctaactctgttctctctcaagggggatggtctgacttactgtgctccgagaggaaaaatgagcgccctgttgatctcgccgttgtttttgttggtagagagttgcactcttcagatgttgcagggaacaaacatgcagatccggctcttttgaacttgcttaaggactcttttaccaagtccaacttctcaatggcatttccatatgtagctacttctgaggaggaaacaatggagaatttgtgggttcagttttaaggagcctgtgccacggtttgggagttgctaatgtgcaatt

SEQ ID NO: 52919 - DNA, 435 bp, Gossypium hirsutum
  unsure (1)..(435): unsure at all n locations; Clone ID: LIB3197-060-Q1-M1-F6
atcgaaacaaacaaaaaaaaacaccccatcttcaacatctcaatcatgggttcatccaatgattacattcacatcgtaatggttccattcatggctcatggccatctcattccattcttagctttagcaaaacaaatccatcaccaaactggcttcaacatcgccattgctaatacccctcttaacatccaatacctccgttcaactctccgaggaaaccccattcccggtatccattttttgcagcttcaattcaacagttccgaccatgggttaccacccaacacagagaacacggagaacttatcgttagatctcatcgataatgcagagtttaatgtgcctggattccctgatagatgcaaatttcatgtttctcaactccatgattntttgagaaaagctgatgggactgatttatggtccaagtttatg

SEQ ID NO: 52920 - DNA, 425 bp, Gossypium hirsutum
  Clone ID: LIB3197-060-Q1-M1-F8
aaaaaaaaaacaaaaatttaattaaaaaaaaaattctcactttaaaacactctctgctctctggcgagcttttgaatgattataaacagtccgtaactcgctatttggagggcaagataaacaagcgttgctgtttgaagcatttaatttgaattggtttgattatgggtgaacaagaaacaaagaccaaagtccctgacccagtggctaacgggacttctcttccggaaaaatccagtgaagttgtagcagagaaaaaagaggaagaagataatggggtaaaggaaatggaagaagataagaaaaatgatgagaaagttgagactgagaagatggatgaagaccaaccggtcaaggatgacacagaaagcatagagacggaaaaagaagataaggaggaacctaaaactgaggcgatggaagaa

SEQ ID NO: 52921 - DNA, 380 bp, Gossypium hirsutum
  Clone ID: LIB3197-060-Q1-M1-F9
gtttctatacagattcaaaaagaaataaaggtagaagaagcaatggccactcttacagtgcccacgacagttccttcagtgtctgaagattgtgaacaactaagaaaagccttttcaggatggggaactaatgagggcttaatcatagatatattgggtcacagaaatgcggagcaacgaaacttgattcgaaaaacctacgctgaaacctatggagaggatctcctcaaggcactagacaaggaactctcgaatgactttgagaggctggttctgctttgggctcttgatcctgctgaacgtgatgcccttttggctaatgaagccaccaaaaggtggacttcaagcaatcaagtccttatggaaatagcctgcacaag

SEQ ID NO: 52922 - DNA, 330 bp, Gossypium hirsutum
  Clone ID: LIB3197-060-Q1-M1-G1
ggaaaccttctccgaataccctccacttggacgtgttgccgttagggacatgagacagaccgttgctgttggtgtgatcaagagtgtggagaagaaggacccatctggagccaaggtgaccaagtctgccgccaagaagggtggcaagtgaactttggtttagtcagtttttgttttgtgagatccgtaattaattccttgagtatttggtttttgctttttagacgatgaggttttcagacaacatggttgtgtgttgaagtttttacttgagagttaacttgcaactgatctttcactactgataagaaaatgagtggacttcaagct

SEQ ID NO: 52923 - DNA, 437 bp, Gossypium hirsutum
  unsure (1)..(437): unsure at all n locations; Clone ID: LIB3197-060-Q1-M1-G10
cccacgcgtccgattcccaccatcggtttcaatggtgagaccggtgaatacaagaacatcagctttactgtttgggatgttggtggccaggacaagatccgaccattgtggagacactacttccaaaacacccaaggacttatttttgtggttgatagcaacgatcgtgatcgtgtggttgaagctagagatgagttgcacaggatgttgaatgaggatgagctgagggatgctgtgctgctagtattcgcaaacaagcaagatcttccaaatgctatgaatgctgctgagattactgacaagcttggccttcattcactccgccagcgccattggtatatccagagcacatgtgctacttccggtgaaggactgtacgaggggctggactggctctcaaacaacattgcaaacaaggcatangtgtgacatgactg

SEQ ID NO: 52924 - DNA, 432 bp, Gossypium hirsutum
  Clone ID: LIB3197-060-Q1-M1-G11
cggacgcgtggggaagaagagatgaaggaaaaggaatggtagatcgcaagcgctggaagttaccgagaagactttatagatccctattatcggaaagagggaatttcagcggataacagaagttcattttaatttataaaatcatggttgccactgctgctacatcctcattctttccaatcacttcttccccggactccattgactcaaaaaacaagaagcttggaaatggatctactaaccttggaggtataaagttgaaaccatctgcttcttctggaagtttgcaagttatggcaaatgcacaagcccccccaaagataaatggtaccacggttgtgatgactccagtagaaggtttcacgagcgaagatgctgcaagttccacacctcccaggacgtttatcaatcagctccctgattggagcatgc

SEQ ID NO: 52925 - DNA, 428 bp, Gossypium hirsutum
  Clone ID: LIB3197-060-Q1-M1-G12
aagaatgatcttcaacatcgtattgcaaaagaggctagaggaaatgcaatcttacaagctagcttggaaagaagaaaacaagcattgcatgaacgtcgcttggcacttgagcaagatgtctgtagattgcaagagcagctgcaagctgaaagggatcttagagctgcccttgaagttggattgagcatgtcagcaggacaatttcctaactcccgcggaatagattccaagacgagggctgagcttgaggagattgctcttgccgaagctgatgtggctagattgaagcagaaagttgcagaactccaccagcagctgaatcagcaacggcagcatcattatggttccatatctgatgcatgtgaccattaccaacatgtccaaaatcataattctcaacagagatttcttcagcaagattttgatac

SEQ ID NO: 52926 - DNA, 449 bp, Gossypium hirsutum
  Clone ID: LIB3197-060-Q1-M1-G2
gccaaaagggctctgctttggagttctttctttcttcctttcttctggcgtacttggggttcccactctaatcatggtatccaagcacaatccatcgggcaacaaaaaacggagcccactatctatatttgctgttattggtttgtgttgtttcttctacattctgggagcatggcagcgaagtggttttggcaaaggagatagcatagcattggaagtaacaaagcaggcagactgcagtatcttaacaaatttgaactttgaaacacatcacaacgatgtagagattgttgagccttccaaaccaaaagctcaggtgtttaagccgtgtgatgtaaaatacactgattacaccccttgccaagagcaagaccgagccatgaagtttcccagggataacatgatttaaccggaaagacactgtccccccgaggaagaataactacact

SEQ ID NO: 52927 - DNA, 413 bp, Gossypium hirsutum
  Clone ID: LIB3197-060-Q1-M1-G4
gttctgtttgaaccatttctcttcaagtgtttatgttggaccacctagtggaaacaattggtttgagaagcaaactgatgggacacttgatatagtatgttcatcatggatggattggttccatggtggtttacagttccagattgagcaccatttgtttccaaggttgccaaggtgccatctcaggaaagtttccccattcgttcaggagctgtgcaagaaacacaacttacagtacgataccgcttcgttttggaaggctaatgtaatgacgatcgagacccttcgatcagccggcttgcaggcaaggattctcagcaacccagttccaaagaacttagtgttggaagtagtaaaaactcatggttgagatggaacttcatgtgaatgaatcagcttatgttgttatgact

SEQ ID NO: 52928 - DNA, 389 bp, Gossypium hirsutum
  Clone ID: LIB3197-060-Q1-M1-G5
aatcaaaatttatataaataaaaactatatatatttttttaaacacacaattacaaaatgataaaatacaaaacgtgtcataattataccctgtcttatttatcacaagctatagtatttgagtatcatagtcatattgttgtgggaaaaaaaattataccctgttacttggaaagtccagcatgaagggctttaagcattgacttcgaaattttcttgcaaaaacttgtaaagctcctcggccaccatggaagggtactcttcatgtggtaaaagagcaccagcaaccttaacaaacttgctgactcctcttgcttccctgagagcttccatctctgcttttgatctcttcggagacccctcagttgacacgaccagaatggggattt

SEQ ID NO: 52929 - DNA, 423 bp, Gossypium hirsutum
  Clone ID: LIB3197-060-Q1-M1-G6
cccacgcgtccggcaaaaactacctttatcaccgtaccccaatcccggttgtttctattctgttttacgccttcatccgatttgattccttgattcattgctttacttttctgccgatttggtcccagcttattttcttgcattttactttgttttctttcgttttccctcttaccaaacactaaatatctttccattttcctctcccccaaagtgaaaccccccattgaaaccatcgaaaaggttgtcatttaatcaaatcccctataaagggattattattattttttaaacacgatgatgatgatgttaccgtccctttccaggccgctcgaacgttgtcttggcgttagagctggtggggatgctctcatgtggacgcttcagcacaccctccctcttttacccttccccgatcccctt

SEQ ID NO: 52930 - DNA, 436 bp, Gossypium hirsutum
  unsure (1)..(436): unsure at all n locations; Clone ID: LIB3197-060-Q1-M1-G7
cggacgcgtgggtaaaaaccctgattctattccctttgttttcaccgatcaaaaggcccttctcataaattttctctcttgatggaagagacgcgatgtgcaatttgactgttccaatttccttttcaacgttcaattaaaaccctagcctcttccttttgcttctatcgggggggggggaggaaggaatcatgtctttcgatctcatatgctgaagccgtcctgcagctgctttggatcctcccaagatctgtacggctgaggaccaaaagaagaaagatgatgaggatttggtgagtggctgtttgggatttcgccctcgctggttctctacaccgcanatccgaatcatttcaacttttaccgtattccccgaagcttttgaatgatgctattcacgtctttgctcgcctttgcgattgctcttctcaacctc

SEQ ID NO: 52931 - DNA, 432 bp, Gossypium hirsutum
  unsure (1)..(432): unsure at all n locations; Clone ID: LIB3197-060-Q1-M1-G8
attctctgtatcatctatcagggccttatttcgactggttcctggctttccggctgcacatccttctcaggtgaacggagatggcaggaaaaggtggaaaggggcttttggcggcaaaaacaaccgccgctaacaaggacaaggacaaagataaggacaagaagcgcccggtttctcgttcatctcgtgccggaattcagttcccagtgggccgaatccaccgtcacctaaagactaggacttccgcaaatgggagagttggtgccacagctgctgtttacttggcctccatccttgagtacctaactgcagaggttcttgaattggctgggaatgcaagcaaggatctgaaagtgaagagaatcaccccgagacatctgcagcttgctattangggtgatgaagagcttgacactcttatcaagggtacta

SEQ ID NO: 52932 - DNA, 436 bp, Gossypium hirsutum
  Clone ID: LIB3197-060-Q1-M1-G9
tatctctgagggtgtcttaagaaacgccttcgagttactttcgggttccatttacgtctttatttctacgtttttgaatttttagtaagcgaaaatgagagagtgcatttcagttcacatcggtcaggctggtatccaagtcggaaatgcctgctgggagctttactgccttgaacatggaatccagcctgatggccagatgccaagtgacaagactgtcggaggaggtgatgatgcttttaacacctttttcagtgaaactggtgctggaaagcacgtccctcgtgctgtctttgtggatcttgagcctactgttattgatgaagtgaggactggtacttaccgtcagcttttccaccctgagcaactcatcagcggcaaggaagacgctgccaacaacttcgcccgtggccactacactattggcaaagagatc

SEQ ID NO: 52933 - DNA, 446 bp, Gossypium hirsutum
  Clone ID: LIB3197-060-Q1-M1-H1
ctcaaacagacaaagaggtcgaagagatcctcgccgctcatctcgatcaacagaaaatccattctgagcaacccgaacaacctgtagttgaagatgacgacgacaacgatgacgacgacgatgatgacgatgacaaggatgaagatgatgccgaaggccttcatgacgtagacggaactggtaggtcaaagcaaagcagaagtgaaaagaagagtcgtaaagcaatgttgaagcttgggatgaaaccgattcccggtgttagcagggtcacaatcaagaagagcaagaatatcttattcgtcatctcgaatccagatgtcttcaagagccctgcatcggatacatatatagtgtttggagaggctaagattgaggacttgagctcacaactgcagactcaagctgctgagcagtttaaggctccggatctcagccatgtgatctcc

SEQ ID NO: 52934 - DNA, 416 bp, Gossypium hirsutum
  Clone ID: LIB3197-060-Q1-M1-H10
gaggaggcagtcccccatcgtatggaggaggcagtcccccatcgtatggaggaggcagtcccccatcatacggaggtggcagtcccccatcatatggaggtggcagtccaccaactactcccattgatccaggaactccaagcattccctcacctccattctttcctgctccaactccaccaattggtggtacatgcgatttctggaggagtcaccccacactgatatggggtctgcttggttggtggggcactgtaggcaacgcatttggcgtgaccaacgctcctggacttggaacaagcatgagcttgccccaagcactttcaaacacacgtactgatggacttggggcgctttaccgggaaggaacagcctcatttctcaactccatggtgaataataggttcccattctcg

SEQ ID NO: 52935 - DNA, 441 bp, Gossypium hirsutum
  Clone ID: LIB3197-060-Q1-M1-H11
tcggccttttgtagaggatggagtccaccctcaaaatcttattcgcagttatcgaactgcttgcaatttggcaattgtgaagatcaaagaactagctgttagtatagaggggaaaagtctagaagagaagaaaagcttattagctaaatgtgctgctacaacactttcttcaaaactcattggtggagaaaaggagttctttgcatcaatggttgtggatgctgttattgctattggcagtgaagataggttgaatatgattgggattaagaaggttcctggtggtaacatgagggattcctttttggttaatggtgttgcctttaaaaagacattttcatatgctggttttgagcagcagccaaagaagtttacgaatcccagaatacttctgttaaacatcgagttggaactgaaatctgagaaagaaaatgctgagat

SEQ ID NO: 52936 - DNA, 384 bp, Gossypium hirsutum
  Clone ID: LIB3197-060-Q1-M1-H12
gcgtttgaagtctgtgttagctggatctcaagctaacccacttgtttcagggttggaggagaatggtgatagtgttggcgaatctggtgatttgggtttctctaagtggttggacaatatacgagggaaaccagacaaggaagcagctgacaaaagaaagctggtcagcaaatggcatccgaccacgaaaggtacacttaaaaggaactacagggtaccttccaaatccgaaggccgacgactacttaaagcagtggcgtctcttctgtcagacgatgatcattttactgatgccacctcccacaagggttgccagataaggagggagagtgctcatggtgaaagtgtatgctgcaacaatgttagagctttgtttgacgagct

SEQ ID NO: 52937 - DNA, 354 bp, Gossypium hirsutum
  Clone ID: LIB3197-060-Q1-M1-H3
gttcgatttatgatgctatggacatagacgtagcaagctgttacgcatatggctaccatagcgcgaatcatgaggatgacctcacgggtgtttacttggtttggcatagactcttactagcggtgtggacacactttgcgtatatacacaccatgcagtggattcattgacctaaaggatatgctgagcctgccataatcatgggcattatgactcattcagcacgagtggcacccaatatcgttctttaccatttatggagaggtggcacacatgtggtcatgactggaaatatccttttaaatggtaagaagaagagactagagtatggtgctgatgcttatgtaactcaag

SEQ ID NO: 52938 - DNA, 295 bp, Gossypium hirsutum
  Clone ID: LIB3197-060-Q1-M1-H4
cccacgcgtccgcgaaaaagatgactctggtgacgtgaaggccgagcgtggggatcccacgtgggaagtcgaccctctggtgctattccagtgtatgccagaagcttctagagctctcggtctgctgaactttgggttctttttgggttccaaatttgggccatctgaagttgggaaattgggtttaaaaaatgtatctgggttggtataaacttagcttttaacttagtttattatttgggcctgatggtttgtaaagacttggactttaaggaattattatttatttattttt

SEQ ID NO: 52939 - DNA, 426 bp, Gossypium hirsutum
  unsure (1)..(426): unsure at all n locations; Clone ID: LIB3197-060-Q1-M1-H6
gcgattgaagtctgtgtgtaactggatctctatctagtacacttggctcagatctaaaggacctcntctcaaatccactaaattcaccatgtctactactttcagcggcgatgaaacggctcccttcttcggcttcctcggcgccgccgccgctctcgtcttctcctgtatgggagctgcatacgggacggctaaaagcggtgtgggtgtggcttcaatgggtgtgatgaggcctgagttggtgatgaaatccattgttccagttgttatggctggtgttttgggtatttatgggttgattattgctgttattattagtactggcatcaatccaaaggccaaatcgtattatctttttgatggttatgcccatctttcctctggtcttgcttgtggacttgctgggctttcagctggaatggcaat

SEQ ID NO: 52940 - DNA, 433 bp, Gossypium hirsutum
  Clone ID: LIB3197-060-Q1-M1-H7
gctgcagtcgccaccattaagaccaagcgcaccattcagtttggcgattggtgtcctactggattcaagtgcggtatcaactaccaaccacccactgttgtccctggtggtgatctcgccaaggtccagagagctgtttgcatgatttctaactccaccagtgttgctgaagtcttctctcgcattgaccataagtttgatcttatgtacgccaaacgtgccttcgttcactggtatgttggtgagggtatggaagaaggagaattctcagaggctcgtgaggatcttgctgcattggagaaggattatgaagaagttggtgctgagtcagctgagggtgatgagggtgaagatgatgagtactaagaagtacgtgtgattgagtgtgcttacgatgtcttttattacctgttgcttccgtgttatgcaagct

SEQ ID NO: 52941 - DNA, 428 bp, Gossypium hirsutum
  Clone ID: LIB3197-060-Q1-M1-H8
cccacgcgtccgggtgattcagttaacgcatcttactaccatattgtgaatccatcaaccaacactgctgttggtgctgaggtgactcatagcttctctaccaatgtgaacaccatcaccgtgggtacacaacatgcattggatccattaaccacaatcaaggcacgggtgaacaatgctggcaaggcaagtgcactcatccagcacgagtggcgcccgaaatcgctctttaccatttctggagaggtggataccaagtccatcgataagagccccaaggtcggacttgctttggcactcaagccttgagagcttaaaaaaaaaaaaggagctcattttggtaagggtatggtagacttgaaaagagttttgaagttttagtctgttattgacattcatggggttgccatcttacctttcatgtcaat

SEQ ID NO: 52942 - DNA, 440 bp, Gossypium hirsutum
  Clone ID: LIB3197-060-Q1-M1-H9
ctgaagatacttttaaggtagataagaaagcaaaaagtatatgggaattccaccaacaggaagttgatcctgctgcacagctttcagtgacttacaatgggtcagctgaagtttcccggatcatccagtggatgtcaaacataattgaggatggtgactccaggaaactccccttctatagggtaaaaacaccagagctagttcctgaggatgcagagcctttctggtcaagaggtccacaaggcttactttccaaaagcatgggaacaaagcaaaaaatccaacgcactataattcgaatatatgattatctaggtgatccaaggattggtccagctttgcttttgggagccttgatgtcctttggtagcatctggctgatgaggactcaacaaaatcgttcggttcagtcaagccaaccgagccaagcagataatggt

SEQ ID NO: 52943 - DNA, 448 bp, Gossypium hirsutum
  unsure (1)..(448): unsure at all n locations; Clone ID: LIB3197-026-Q1-M1-B4-F2A
tttttttttcatatttttttgaaactttnggnttttaacgaacattcttaccctctctttttttttttgttacttccaaaacaccactggcgnccggagccaccacgcccgaacacgggcctattgcttttttttttttggggggggggggaaaaaaacttttttaacccccccattaaagattccccacaggccaaaacttttttttataaggggggggggggggaaaacttcttttttcccacaaagggggttccccccccccctcttttggggaaaattccccctttgggggcccccaaaagggggggggggaaaaaaaaaaccccaaaaaaatcccccccccctttttaaaaaaaaaaccttttcccccccccctaaaaaaaaaaaaggggggtttctcttggggggggaaacaccgcgggggaaaattcccccttgggggggc

SEQ ID NO: 52944 - DNA, 455 bp, Gossypium hirsutum
  Clone ID: LIB3197-026-Q1-M1-B4-R2A
attaaccacagaaattcctatagaatatctgtttctttggttgaggttttcagaaggtaactggtaatggggagaccaccttgctgtgacaaagtcggtgtgaagaaaggtccatggactcctgaagaagatatcgtcttggtgtcttatattcaagaacatggtcctgggaattggagagctgttcctaccaatacagggttgctcagatgtagcaagagttgcaggcttagatggactaattacttgaggcccgggattcgaaggggtaactttacagaacatgaagagaagatgataatccaccttcaagctcttttaggcaacagatgggctgcaatagcatcttacttgcctcaaagaacagacaatgacattaaaaactactggaacactcatctgaagaagaagctgaagaaactccatggaagtgaagtttattgcagagatgggtt

SEQ ID NO: 52945 - DNA, 2484 bp, Gossypium hirsutum
  Clone ID: LIB3197-059-F3_FLI
attttgggagctctcattcttctaattcagctcagcatcagtcagtctctgtgaatgagcagttggaagagaagtggtatgctagtccagaggatatcaatgaaggtgtttgcacaattttatctaatatatacagtttgggtgtgctgctttttgagttgctttgtcaatttgaatctgagagaggacatgctgctgcaatgttggatctacgccataggatttttcctccaacttttctgtcagaaaatctcaaggaagctggattttgtcttagactacttcacccagaaccttctttgcgcccaacaaccagggatatcctacaatctgaagtacttaatggattccaggaagtatttgcagaagaattgtcgtcatccattaaccaagatgatactgaatcagaattattattgcatttccttggtttatcaaaagagcaaaagcagaagcatgcctcaaaactaatggaagatattgcttgcttggaagcagatattaaagaggttgagaaaagaaggcacttttctagaaaacctttaacttattcttccatcaatgcgagggaatgtaggcaccatagtaaagaacctccaatctcggagatgcattcaagtttatacccgttttccagtgacaatgaaatgaggttaatgagaaatatcaatcagcttgaatctgcttatttctctatgaggtcaagagtcccttttcatgagaccgattctatgagacggccagataaggatttactgaaaaatcgtgacaatgggcatttgacacaaaacaatgaagaaataccgaatcctcctgattgccttggagcattctttgatggtttgtgtaagtatgctcgatatagcaagtttgaagtccgtgggataatgagaagtggggagttcaacaactctgcgaatgtaatctgttctttaagttttgatcgtgacgaggattattttgctgctgctggtgtctctaagaaaataaagatattcgaatttaatgcactttttaatgactctgttgatgttcattatccagtcattgagatgttaaacaaatcaaagcttagctgtgtttgctggaataactatatcaagaactatctggcttcaactgactacgacggtctggttaagttatgggatgcaagcaccggtcaagctatctctcattacattgaacatgaaaagagagcctggtctgttgacttttctcaagtgtatccaacaaaattggctagtggcagtgatgactgttccgtgaaactatggagcattaacgagatgaactgcttgggaaccatcaggaacattgcaaatgtctgctgtgttcagttttctgctcactcccctcatttactggcatttggatctgcggattacaaaacgtattgctatgatcttcggaatgctagagccccatggtgtgttcttgatggtcatgataaagccgtgagctatgtgaagttcctggactcggaaactgtagttactgcttccactgacaacacattaaagctttgggatctcaataaaactagcagtgggggcctgtcctctaatgcttgcagcttaacattttctggacatacaaatgagaagaattttgttggattatccgttgttgatggttttatagcatgtggctcagaaacaaatgaggtttatgcatactataggtcactgcctatgccaataacttctcataaatttgggtccattgatcccatttctgggaaagacacagatgatgacaacgggctgtttgtatcaagtgtttgctggagagggaaatcagacatggttgttgctgcaaattctagtggatgtattaaagtattgcagatggtttaaggagaaggttaattgcttagagtcatcaattactggcgtcatttggttgccaagttttattctcgaggcttattcttaagcattgaagccatcttgggttcaggcaaatatgtcatacatggatgacttggtctgctcggtggctcattataataggcttggctttgattcatagaaaattatatacagagtagagtcgagccaaactggagttatggttccaggttatcaagattatccagagctaggttccagttattcttttacatgcttaagaatccagaatatcatgacacttcctgagtcttgagaaagaggatcaaaccgtaaatacgggaatgcaaaatcaagattgaggtaacttctgctaagaggctttccatctcggttgtgggagcgagagtgtatgctatattagtacgtgtctttacttctgctggtgatccttgaaactaaggtgcagtccttttaagcgttgtaatatatatatatatatagagagagagagagaggtataattggtaatttactcaaatgtagggtattctttattgagatgtaagtaagcattctatgattctatgtaactgatgttttaccagtgtaaatctataaattttgatgt

SEQ ID NO: 52946 - DNA, 422 bp, Gossypium hirsutum
  Clone ID: LIB3197-026-Q1-F1-B4
aaaaaaaataaaaaaaaataaaaaaaaaaaaaaaaaaaatttaaaaaaaaaaaaaaaaaaattataaaaaaaaaaaaaaataaaaaaaaaataaataataaaaaaaaaattaactaaaaaaaaaaaaaaaaataaaatttaaaaatttttataaaaaaaaaaaataaattaaaaaaaaaaaaatcaaaaaaaatctccccaaaaatccaaaaaaaaaaaaaactaaaaaccccccccaaaaaaaaaaaaaattattataaacaaaatttaaaaaaaaaaacattaaaaaattccctctttttaaaaaaaaaaaaaaaaaaattttctaaaaaaaaaaaattttataaaaaaaaaattttattttataaattataaaaaaaaaattaccctaaatttaaaatttaataaaaaaaaatccttaa

SEQ ID NO: 52947 - DNA, 638 bp, Gossypium hirsutum
  Clone ID: LIB3197-026-Q1-F2-B4
gggggggaaaaaaaaaaaaattttaataaccaaaaaaaaaaatttaaaaaaagaaaaaattttttttttaaagaggggggggggaaaaaattttttttttttccaaaaagggttttcccccccccctttaaagggaaaaataaaaatttttggggccccacaagggggggggggtggaaaaaaaatcccaagaaaaaaccccccccagcttttaaaaaaaaaagtataataccccccccttaaaaaaaaaaaaagggggtttttttaggggggagacaaaaaagagaaaaatttctttttttgtgggggggttaaaaaaaaaccttttttaaaaaaaaaaaggggggagaaaaaaaggtgtttttttttttttaaaaaaaaaagggggtcctttggggggaggggggggggaaaaaaaattcttttgattgtgaaaaaaaaaagtttttacacccctgcggcgcggggaaaacccccccaacagggggggagggcgcccagtaacatattcccctctaaaaaaaaaaggggaaagaggggggccccccagaacccccccctggtgaaaagaaggggggggggaccccaaatatttgtgaaaaacgcgaaaagaggtgttttttttccccccccttaaa

SEQ ID NO: 52948 - DNA, 315 bp, Gossypium hirsutum
  Clone ID: LIB3197-026-Q1-R1-B4
attaaccacagaaattcctatagaatatctgtttctttggttgaggttttcagaaggtaactggtaatggggagaccaccttgctgtgacaaagtcggtgtgaagaaaggtccatggactcctgaagaagatatcgtcttggtgtcttatattcaagaacatggtcctgggaattggagagctgttcctaccaatacagggttgctcagatgtagcaagagttgcaggcttagatggactaattacttgaggcccgggattcgaaggggtaactttacagaacatgaagagaagatgataatccaccttcaagct

SEQ ID NO: 52949 - DNA, 526 bp, Gossypium hirsutum
  Clone ID: LIB3197-026-Q1-R2-B4
attaaccacagaaattcctatagaatatctgtttctttggttgaggttttcagaaggtaactggtaatggggagaccaccttgctgtgacaaagtcggtgtgaagaaaggtccatggactcctgaagaagatatcgtcttggtgtcttatattcaagaacatggtcctgggaattggagagctgttcctaccaatacagggttgctcagatgtagcaagagttgcaggcttagatggactaattacttgaggcccgggattcgaaggggtaactttacagaacatgaagagaagatgataatccaccttcaagctcttttaggcaacagatgggctgcaatagcatcttacttgcctcaaagaacagacaatgacattaaaaactactggaacactcatctgaagaagaagctgaagaaactccatggaagtgaagtttattgcagagatgggttcacatcatcagctgcatcagaccagatttcacgaggtcaatgggagagaaagttgcagactgatataaata
